(19) United States
(12) Patent Application Publication
(10) Pub. No.: US 2025/0064980 A1
(43) Pub. Date: Feb. 27, 2025

(54) Materials and Methods for Treatment of Duchenne Muscular Dystrophy

(71) Applicant: Vertex Pharmaceuticals Incorporated, Boston, MA (US)

(72) Inventors: Ami Meda Kabadi, Cambridge, MA (US); Chad Albert Cowan, Cambridge, MA (US); Ante Sven Lundberg, Cambridge, MA (US)

(73) Assignee: Vertex Pharmaceuticals Incorporated, Boston, MA (US)

(21) Appl. No.: 18/760,930

(22) Filed: Jul. 1, 2024

Related U.S. Application Data
(62) Division of application No. 17/748,495, filed on May 19, 2022, now Pat. No. 12,053,531.
Application No. 17/748,495 is a division of application No. 15/763,328, filed on Jun. 22, 2018, now Pat. No. 11,369,692.
(60) Provisional application No. 62/324,064, filed on Apr. 18, 2016.
(60) Provisional application No. 62/247,484, filed on Oct. 28, 2015.

(51) Int. Cl. A61K 48/00; A61K 38/46; A61P 21/00; A61P 25/14; C12N 9/22; C12N 15/113; C12N 15/90

(52) U.S. Cl. CPC A61K 48/0058; A61K 38/465; A61P 21/00; A61P 25/14; C12N 9/22; C12N 15/113; C12N 15/907

(57) ABSTRACT

The present application provides materials and methods for treating a patient with Duchenne Muscular Dystrophy (DMD) both ex vivo and in vivo. In addition, the present application provides materials and methods for editing a dystrophin gene in a cell by genome editing.

### RELATED APPLICATIONS

[0001] This application is a divisional of U.S. application Ser. No. 17/748,495, filed May 19, 2022, which is a divisional of U.S. application Ser. No. 15/763,328 filed Jun. 22, 2018, now issued as 11,369,692, which is a 371 application of PCT/IB2016/001679 filed Oct. 28, 2016, which claims the benefit of U.S. Provisional Application No. 62/247,484 filed Oct. 28, 2015, and U.S. Provisional Application No. 62/324,064 filed Apr. 18, 2016, all of which are incorporated herein in their entirety by references.

### TECHNICAL FIELD

[0002] The present application provides materials and methods for treating a patient with Duchenne Muscular Dystrophy (DMD), both ex vivo and in vivo. In addition, the present application provides materials and methods for editing a dystrophin gene in a cell by genome editing.

### INCORPORATION BY REFERENCE OF SEQUENCE LISTING

[0003] This application contains a Sequence Listing in computer readable form (filename: 01245-0021-01_SL.txt: 286,925,721 bytes—ASCII text file; created Aug. 22, 2022), which is incorporated herein by reference in its entirety and forms part of the disclosure.

### BACKGROUND

[0004] Duchenne Muscular Dystrophy (DMD) is a severe X-linked recessive neuromuscular disorder effecting approximately 1 in 4,000 live male births. Patients are generally diagnosed by the age of 4, and wheel chair bound by the age of 10. Most patients do not live past the age of 25 due to cardiac and/or respiratory failure. Existing treatments are palliative at best. The most common treatment for DMD is steroids, which are used to slow the loss of muscle strength. However, because most DMD patients start receiving steroids early in life, the treatment delays puberty and further contributes to the patient's diminished quality of life.

[0005] DMD is caused by mutations in the dystrophin gene (Chromosome X: 31,117,228-33,344,609 (Genome Reference Consortium—GRCh38/hg38)). With a genomic region of over 2.2 megabases in length, dystrophin is the second largest human gene. The dystrophin gene contains 79 exons that are processed into an 11,000 base pair mRNA that is translated into a 427 kDa protein. Functionally, dystrophin acts as a linker between the actin filaments and the extracellular matrix within muscle fibers. The N-terminus of dystrophin is an actin-binding domain, while the C-terminus interacts with a transmembrane scaffold that anchors the muscle fiber to the extracellular matrix. Upon muscle contraction, dystrophin provides structural support that allows the muscle tissue to withstand mechanical force. DMD is caused by a wide variety of mutations within the dystrophin gene that result in premature stop codons and therefore a truncated dystrophin protein. Truncated dystrophin proteins do not contain the C-terminus, and therefore cannot provide the structural support necessary to withstand the stress of muscle contraction. As a result, the muscle fibers pull themselves apart, which leads to muscle wasting.

[0006] Becker Muscular Dystrophy (BMD) is a less severe form of muscular dystrophy compared to DMD. While BMD is also caused by mutations within the dystrophin gene, BMD mutations maintain the dystrophin reading frame. BMD dystrophin proteins contain internal deletions, but also retain portions of both the N and C termini. Therefore, the BMD dystrophin protein is shorter than the wild type protein, but can still function as a linker between the actin filaments and the extracellular matrix. In fact, depending on the size of the internal deletion, BMD patients may have only minor symptoms. As a result, most research efforts have been focused on converting the severe DMD phenotype to a less severe BMD phenotype.

[0007] Genome engineering refers to the strategies and techniques for the targeted, specific modification of the genetic information (genome) of living organisms. Genome engineering is a very active field of research because of the wide range of possible applications, particularly in the areas of human health; the correction of a gene carrying a harmful mutation, for example, to explore the function of a gene. Early technologies developed to insert a gene into a living cell, such as transgenesis, were often limited by the random nature of the insertion of the new sequence into the genome. The new gene was usually positioned blindly, and may have inactivated or disturbed the functioning of other genes, or even caused severe unwanted effects. Furthermore, these technologies generally offered no degree of reproducibility, as there was no guarantee that the new sequence would be inserted at the same place in two different cells. More recent genome engineering strategies, such as ZFNs, TALENs, HEs and MegaTALs, enable a specific area of the DNA to be modified, thereby increasing the precision of the correction or insertion compared to early technologies, and offering some degree of reproducibility. Despite this, such recent genome engineering strategies have limitations.

[0008] Multiple studies suggest that genome engineering would be an attractive strategy for treating DMD. One of the earliest approaches involved engineering a mini-dystrophin gene that is less than 4 kb and can be packaged into an adeno-associated virus (AAV) vector. This is a replacement gene therapy that has been tested experimentally in mouse (Wang, B., J. Li, and X. Xiao, Proc Natl Acad Sci USA, 2000. 97(25): p. 13714-9) (Watchko, J., et al., Hum Gene Ther, 2002. 13(12): p. 1451-60) and dog models (Wang, Z., et al., Mol Ther, 2012. 20(8): p. 1501-7), and a phase I clinical trial suggested that there are problems associated with an immune response to the non-self synthetic epitopes (Mendell, J. R., et al., N Engl J Med, 2010. 363(15): p. 1429-37).

[0009] More recently, oligo-mediated exon skipping was used to restore the reading frame in the cells of DMD patients. In this strategy, short oligos block splicing signals found in pre-mRNA and facilitate skipping of a single exon. Skipping of a single exon allows the transcriptional machinery to bypass the premature stop codon and produce a protein with intact N and C termini. Phase I/II clinical trials have shown that weekly injections of anti-sense oligos induce exon skipping and dystrophin positive fibers (Cirak, S., et al., Lancet, 2011. 378(9791): p. 595-605). However, the major limitation of this type of treatment is that it requires repeat dosing over the lifetime of the patient because the drug targets the pre-mRNA rather than the genomic locus. Ongoing Phase II/III clinical trials are evaluating delivery of exon skipping oligos via AAV for sustained expression, as well as delivery of multiple anti-sense oligos for facilitating multi-exon skipping strategies.

[0010] Despite efforts from researchers and medical professionals worldwide who have been trying to address DMD, and despite the promise of genome engineering approaches, there still remains a critical need for developing safe and effective treatments for DMD, which is among the most prevalent and debilitating genetic disorders.

### SUMMARY

[0011] The present disclosure presents an approach to address the genetic basis of DMD. By using genome engineering tools to create permanent changes to the genome that can restore the dystrophin reading frame and restore the dystrophin protein activity with as few as a single treatment, the resulting therapy can correct the underlying genetic defect causing the disease.

[0012] Provided herein are cellular, ex vivo and in vivo methods for creating permanent changes to the genome by deleting, inserting, or replacing (deleting and inserting) one or more exons or aberrant intronic splice acceptor or donor sites in the dystrophin gene by genome editing and restoring the dystrophin reading frame and restoring the dystrophin protein activity, which can be used to treat Duchenne Muscular Dystrophy (DMD). Also provided herein are components, kits and compositions for performing such methods. Also, provided are cells produced by such methods.

[0013] Provided herein is a method for editing a dystrophin gene in a human cell by genome editing, the method comprising the step of introducing into the human cell one or more deoxyribonucleic acid (DNA) endonucleases to effect one or more single-strand breaks (SSBs) or double-strand breaks (DSBs) within or near the dystrophin gene that results in a permanent deletion, insertion, or replacement of one or more exons or aberrant intronic splice acceptor or donor sites within or near the dystrophin gene and results in restoration of the dystrophin reading frame and restoration of the dystrophin protein activity. The human cell can be a muscle cell or muscle precursor cell.

[0014] Also provided herein is an ex vivo method for treating a patient (e.g., a human) with Duchenne Muscular Dystrophy (DMD), the method comprising the steps of: i) creating a DMD patient specific induced pluripotent stem cell (iPSC); ii) editing within or near a dystrophin gene of the iPSC; iii) differentiating the genome-edited iPSC into a Pax7+ muscle progenitor cell; and iv) implanting the Pax7+ muscle progenitor cell into the patient.

[0015] The step of creating a patient specific induced pluripotent stem cell (iPSC) can comprise: a) isolating a somatic cell from the patient; and b) introducing a set of pluripotency-associated genes into the somatic cell to induce the somatic cell to become a pluripotent stem cell. The somatic cell can be a fibroblast. The set of pluripotency-associated genes is one or more of the genes selected from the group consisting of OCT4, SOX2, KLF4, Lin28, NANOG and cMYC.

[0016] The step of editing within or near a dystrophin gene of the iPSC can comprise introducing into the iPSC one or more deoxyribonucleic acid (DNA) endonucleases to effect one or more single-strand breaks (SSBs) or double-strand breaks (DSBs) within or near the dystrophin gene that results in a permanent deletion, insertion, or replacement of one or more exons or aberrant intronic splice acceptor or donor sites within or near the dystrophin gene and results in restoration of the dystrophin reading frame and restoration of the dystrophin protein activity.

[0017] The step of differentiating the genome-edited iPSC into a Pax7+ muscle progenitor cell can comprise contacting the genome-edited iPSC with specific media formulations, including small molecule drugs; transgene overexpression; or serum withdrawal.

[0018] The step of implanting the Pax7+ muscle progenitor cell into the patient can comprise implanting the Pax7+ muscle progenitor cell into the patient by local injection into the desired muscle.

[0019] Also provided herein is an in vivo method for treating a patient (e.g., a human) with Duchenne Muscular Dystrophy (DMD), the method comprising the step of editing a dystrophin gene in a cell of the patient. The cell can be a muscle cell or muscle precursor cell.

[0020] The step of editing a dystrophin in a cell of the patient can comprise introducing into the cell of the patient one or more deoxyribonucleic acid (DNA) endonucleases to effect one or more single-strand breaks (SSBs) or double-strand breaks (DSBs) within or near the dystrophin gene that results in a permanent deletion, insertion, or replacement of one or more exons or aberrant intronic splice acceptor or donor sites within or near the dystrophin gene and results in restoration of the dystrophin reading frame and restoration of the dystrophin protein activity.

[0021] The one or more DNA endonucleases can be a Cas1, Cas1B, Cas2, Cas3, Cas4, Cas5, Cas6, Cas7, Cas8, Cas9 (also known as Csn1 and Csx12), Cas100, Csy1, Csy2, Csy3, Cse1, Cse2, Csc1, Csc2, Csa5, Csn2, Csm2, Csm3, Csm4, Csm5, Csm6, Cmr1, Cmr3, Cmr4, Cmr5, Cmr6, Csb1, Csb2, Csb3, Csx17, Csx14, Csx10, Csx16, CsaX, Csx3, Csx1, Csx15, Csf1, Csf2, Csf3, Csf4, or Cpf1 endonuclease; a homolog thereof, a recombinant of the naturally occurring molecule thereof, a codon-optimized thereof, modified version thereof, and combinations of any of the foregoing.

[0022] The method can comprise introducing into the cell one or more polynucleotides encoding the one or more DNA endonucleases. The method can comprise introducing into the cell one or more ribonucleic acids (RNAs) encoding the one or more DNA endonucleases. The one or more polynucleotides or one or more RNAs can be one or more modified polynucleotides or one or more modified RNAs. The one or more DNA endonuclease can be one or more proteins or polypeptides.

[0023] The method can further comprise introducing into the cell one or more guide ribonucleic acids (gRNAs). The one or more gRNAs are single-molecule guide RNA (sgRNAs). The one or more gRNAs or one or more sgRNAs is one or more modified gRNAs or one or more modified sgRNAs. The one or more DNA endonucleases can be pre-complexed with one or more gRNAs or one or more sgRNAs.

[0024] The method can further comprise introducing into the cell a polynucleotide donor template comprising at least a portion of the wild-type dystrophin gene or cDNA. The at least a portion of the wild-type dystrophin gene or cDNA can include at least a part of exon 1, exon 2, exon 3, exon 4, exon 5, exon 6, exon 7, exon 8, exon 9, exon 10, exon 11, exon 12, exon 13, exon 14, exon 15, exon 16, exon 17, exon 18, exon 19, exon 20, exon 21, exon 22, exon 23, exon 24, exon 25, exon 26, exon 27, exon 28, exon 29, exon 30, exon 31, exon 32, exon 33, exon 34, exon 35, exon 36, exon 37, exon 38, exon 39, exon 40, exon 41, exon 42, exon 43, exon 44, exon 45, exon 46, exon 47, exon 48, exon 49, exon 50, exon 51, exon 52, exon 53, exon 54, exon 55, exon 56, exon 57, exon 58, exon 59, exon 60, exon 61, exon 62, exon 63, exon 64, exon 65, exon 66, exon 67, exon 68, exon 69, exon 70, exon 71, exon 72, exon 73, exon 74, exon 75, exon 76, exon 77, exon 78, exon 79, intronic regions, synthetic intronic regions, fragments, combinations thereof, or the entire dystrophin gene or cDNA. The at least a portion of the wild-type dystrophin gene or cDNA can include exon 1, exon 2, exon 3, exon 4, exon 5, exon 6, exon 7, exon 8, exon 9, exon 10, exon 11, exon 12, exon 13, exon 14, exon 15, exon 16, exon 17, exon 18, exon 19, exon 20, exon 21, exon 22, exon 23, exon 24, exon 25, exon 26, exon 27, exon 28, exon 29, exon 30, exon 31, exon 32, exon 33, exon 34, exon 35, exon 36, exon 37, exon 38, exon 39, exon 40, exon 41, exon 42, exon 43, exon 44, exon 45, exon 46, exon 47, exon 48, exon 49, exon 50, exon 51, exon 52, exon 53, exon 54, exon 55, exon 56, exon 57, exon 58, exon 59, exon 60, exon 61, exon 62, exon 63, exon 64, exon 65, exon 66, exon 67, exon 68, exon 69, exon 70, exon 71, exon 72, exon 73, exon 74, exon 75, exon 76, exon 77, exon 78, exon 79, intronic regions, synthetic intronic regions, fragments, combinations thereof, or the entire dystrophin gene or cDNA. The donor template can be a single or double stranded polynucleotide.

[0025] The method can further comprise introducing into the cell one or more guide ribonucleic acid (gRNAs). The one or more DNA endonucleases can be one or more Cas9 or Cpf1 endonucleases that effect a pair of single-strand breaks (SSBs) or double-strand breaks (DSBs), the first SSB or DSB break at a 5′ locus and the second SSB or DSB break at a 3′ locus, that results in a permanent deletion or replacement of one or more exons or aberrant intronic splice acceptor or donor sites between the 5′ locus and the 3′ locus within or near the dystrophin gene and results in restoration of the dystrophin reading frame and restoration of the dystrophin protein activity. One gRNA can create a pair of SSBs or DSBs. One gRNA can comprise a spacer sequence that is complementary to either the 5′ locus, the 3′ locus, or a segment between the 5′ locus and 3′ locus. A first gRNA can comprise a spacer sequence that is complementary to a segment of the 5′ locus and the second gRNA can comprise a spacer sequence that is complementary to a segment of the 3′ locus.

[0026] The one or more gRNAs can be one or more single-molecule guide RNAs (sgRNAs). The one or more gRNAs or one or more sgRNAs can be one or more modified gRNAs or one or more modified sgRNAs. The one or more DNA endonucleases can be pre-complexed with the one or more gRNAs or one or more sgRNAs.

[0027] There can be a deletion of the chromosomal DNA between the 5′ locus and the 3′ locus.

[0028] The deletion can be a single exon deletion. The single exon deletion can be a deletion of exon 2, exon 8, exon 43, exon 44, exon 45, exon 46, exon 50, exon 51, exon 52, or exon 53. The 5′ locus can be proximal to a 5′ boundary of a single exon selected from the group consisting of exon 2, exon 8, exon 43, exon 44, exon 45, exon 46, exon 50, exon 51, exon 52, and exon 53. The 3′ locus can be proximal to a 3′ boundary of a single exon selected from the group consisting of exon 2, exon 8, exon 43, exon 44, exon 45, exon 46, exon 50, exon 51, exon 52, and exon 53. The 5′ locus can be proximal to a 5′ boundary and the 3′ locus can be proximal to the 3′ boundary of a single exon selected from the group consisting of exon 2, exon 8, exon 43, exon 44, exon 45, exon 46, exon 50, exon 51, exon 52, and exon 53. Proximal to the boundary of the exon can include the surrounding splice donors and acceptors of the neighboring intron.

[0029] The deletion can be a multi-exon deletion. The multi-exon deletion can be a deletion of exons 45-53 or exons 45-55. The 5′ locus can be proximal to a 5′ boundary of multiple exons selected from the group consisting of exons 45-53 and exons 45-55. The 3′ locus can be proximal to a 3′ boundary of multiple exons selected from the group consisting of exons 45-53 and exons 45-55. The 5′ locus can be proximal to a 5′ boundary and a 3′ locus can be proximal to the 3′ boundary of multiple exons selected from the group consisting of exons 45-53 and exons 45-55. Proximal to the boundary of the exon can include the surrounding splice donors and acceptors of the neighboring intron.

[0030] There can be a replacement of the chromosomal DNA between the 5′ locus and the 3′ locus. The replacement can be a single exon replacement. The single exon replacement can be a replacement of exon 2, exon 8, exon 43, exon 44, exon 45, exon 46, exon 50, exon 51, exon 52, exon 53, or exon 70. The 5′ locus can be proximal to a 5′ boundary of a single exon selected from the group consisting of exon 2, exon 8, exon 43, exon 44, exon 45, exon 46, exon 50, exon 51, exon 52, exon 53, or exon 70. The 3′ locus can be proximal to a 3′ boundary of a single exon selected from the group consisting of exon 2, exon 8, exon 43, exon 44, exon 45, exon 46, exon 50, exon 51, exon 52, exon 53, or exon 70. The 5′ locus can proximal to a 5′ boundary and a 3′ locus can be proximal to the 3′ boundary of a single exon selected from the group consisting of exon 2, exon 8, exon 43, exon 44, exon 45, exon 46, exon 50, exon 51, exon 52, exon 53, or exon 70. Proximal to the boundary of the exon can include the surrounding splice donors and acceptors of the neighboring intron or neighboring exon.

[0031] The replacement can be a multi-exon replacement. The multi-exon replacement can be a replacement of exons 45-53 or exons 45-55. The 5′ locus can be proximal to a 5′ boundary of multiple exons selected from the group consisting of exons 45-53 or exons 45-55. The 3′ locus can be proximal to a 3′ boundary of multiple exons selected from the group consisting of exons 45-53 or exons 45-55. The 5′ locus can proximal to a 5′ boundary and a 3′ locus can be proximal to the 3′ boundary of multiple exons selected from the group consisting of exons 45-53 or exons 45-55. Proximal to the boundary of the exon can include the surrounding splice donors and acceptors of the neighboring intron or neighboring exon.

[0032] The method can further comprise introducing into the cell a polynucleotide donor template comprising at least a portion of the wild type dystrophin gene or cDNA and the replacement is by homology directed repair (HDR).

[0033] The at least a portion of the wild-type dystrophin gene or cDNA can include at least a part of exon 1, exon 2, exon 3, exon 4, exon 5, exon 6, exon 7, exon 8, exon 9, exon 10, exon 11, exon 12, exon 13, exon 14, exon 15, exon 16, exon 17, exon 18, exon 19, exon 20, exon 21, exon 22, exon 23, exon 24, exon 25, exon 26, exon 27, exon 28, exon 29, exon 30, exon 31, exon 32, exon 33, exon 34, exon 35, exon 36, exon 37, exon 38, exon 39, exon 40, exon 41, exon 42, exon 43, exon 44, exon 45, exon 46, exon 47, exon 48, exon 49, exon 50, exon 51, exon 52, exon 53, exon 54, exon 55, exon 56, exon 57, exon 58, exon 59, exon 60, exon 61, exon 62, exon 63, exon 64, exon 65, exon 66, exon 67, exon 68, exon 69, exon 70, exon 71, exon 72, exon 73, exon 74, exon 75, exon 76, exon 77, exon 78, exon 79, intronic regions, synthetic intronic regions, fragments, combinations thereof, or the entire dystrophin gene or cDNA. The at least a portion of the wild-type dystrophin gene or cDNA can include exon 1, exon 2, exon 3, exon 4, exon 5, exon 6, exon 7, exon 8, exon 9, exon 10, exon 11, exon 12, exon 13, exon 14, exon 15, exon 16, exon 17, exon 18, exon 19, exon 20, exon 21, exon 22, exon 23, exon 24, exon 25, exon 26, exon 27, exon 28, exon 29, exon 30, exon 31, exon 32, exon 33, exon 34, exon 35, exon 36, exon 37, exon 38, exon 39, exon 40, exon 41, exon 42, exon 43, exon 44, exon 45, exon 46, exon 47, exon 48, exon 49, exon 50, exon 51, exon 52, exon 53, exon 54, exon 55, exon 56, exon 57, exon 58, exon 59, exon 60, exon 61, exon 62, exon 63, exon 64, exon 65, exon 66, exon 67, exon 68, exon 69, exon 70, exon 71, exon 72, exon 73, exon 74, exon 75, exon 76, exon 77, exon 78, exon 79, intronic regions, synthetic intronic regions, fragments, combinations thereof, or the entire dystrophin gene or cDNA.

[0034] The method can further comprise introducing into the cell one guide ribonucleic acid (gRNA) and a polynucleotide donor template comprising at least a portion of the wild-type dystrophin gene. The one or more DNA endonucleases can be one or more Cas9 or Cpf1 endonucleases that effect one single-strand break (SSB) or double-strand break (DSB) at a locus within or near the dystrophin gene that facilitates insertion of a new sequence from the polynucleotide donor template into the chromosomal DNA at the locus that results in permanent insertion or correction of one or more exons or aberrant intronic splice acceptor or donor sites within or near the dystrophin gene and results in restoration of the dystrophin reading frame and restoration of the dystrophin protein activity. The gRNA can comprise a spacer sequence that is complementary to a segment of the locus.

[0035] The method can further comprise introducing into the cell one or more guide ribonucleic acid (gRNAs) and a polynucleotide donor template comprising at least a portion of the wild-type dystrophin gene. The one or more DNA endonucleases can be one or more Cas9 or Cpf1 endonucleases that effect a pair of single-strand breaks (SSBs) or double-strand breaks (DSBs), the first at a 5′ locus and the second at a 3′ locus, within or near the dystrophin gene that facilitates insertion of a new sequence from the polynucleotide donor template into the chromosomal DNA between the 5′ locus and the 3′ locus that results in a permanent insertion or correction of one or more exons or aberrant intronic splice acceptor or donor sites between the 5′ locus and the 3′ locus within or near the dystrophin gene and results in restoration of the dystrophin reading frame and restoration of the dystrophin protein activity.

[0036] One gRNA can create a pair of SSBs or DSBs. One gRNA can comprise a spacer sequence that is complementary to either the 5′ locus, the 3′ locus, or a segment between the 5′ locus and the 3′ locus. A first gRNA can comprise a spacer sequence that is complementary to a segment of the 5′ locus and the second gRNA can comprise a spacer sequence that is complementary to a segment of the 3′ locus.

[0037] The one or more gRNAs can be one or more single-molecule guide RNAs (sgRNAs). The one or more gRNAs or one or more sgRNAs can be one or more modified gRNAs or one or more modified sgRNAs. The one or more DNA endonucleases can be pre-complexed with the one or more gRNAs or one or more sgRNAs.

[0038] There can be an insertion between the 5′ locus and the 3′ locus.

[0039] The insertion can be a single exon insertion. The single exon insertion can be an insertion of exon 2, exon 8, exon 43, exon 44, exon 45, exon 46, exon 50, exon 51, exon 52, exon 53, or exon 70. The 5′ locus or 3′ locus can be proximal to a boundary of a single exon selected from the group consisting of exon 2, exon 8, exon 43, exon 44, exon 45, exon 46, exon 50, exon 51, exon 52, exon 53, and exon 70. Proximal to the boundary of the exon can include the surrounding splice donors and acceptors of the neighboring intron or neighboring exon.

[0040] The insertion can be a multi-exon insertion. The multi-exon insertion can be an insertion of exons 45-53 or exons 45-55. The 5′ locus or 3′ locus can be proximal to a boundary of multiple exons selected from the group consisting of exons 45-53 or exons 45-55. Proximal to the boundary of the exon can include the surrounding splice donors and acceptors of the neighboring intro.

[0041] The at least a portion of the wild-type dystrophin gene or cDNA can include at least a part of exon 1, exon 2, exon 3, exon 4, exon 5, exon 6, exon 7, exon 8, exon 9, exon 10, exon 11, exon 12, exon 13, exon 14, exon 15, exon 16, exon 17, exon 18, exon 19, exon 20, exon 21, exon 22, exon 23, exon 24, exon 25, exon 26, exon 27, exon 28, exon 29, exon 30, exon 31, exon 32, exon 33, exon 34, exon 35, exon 36, exon 37, exon 38, exon 39, exon 40, exon 41, exon 42, exon 43, exon 44, exon 45, exon 46, exon 47, exon 48, exon 49, exon 50, exon 51, exon 52, exon 53, exon 54, exon 55, exon 56, exon 57, exon 58, exon 59, exon 60, exon 61, exon 62, exon 63, exon 64, exon 65, exon 66, exon 67, exon 68, exon 69, exon 70, exon 71, exon 72, exon 73, exon 74, exon 75, exon 76, exon 77, exon 78, exon 79, intronic regions, synthetic intronic regions, fragments, combinations thereof, or the entire dystrophin gene or cDNA. The at least a portion of the wild-type dystrophin gene or cDNA can include exon 1, exon 2, exon 3, exon 4, exon 5, exon 6, exon 7, exon 8, exon 9, exon 10, exon 11, exon 12, exon 13, exon 14, exon 15, exon 16, exon 17, exon 18, exon 19, exon 20, exon 21, exon 22, exon 23, exon 24, exon 25, exon 26, exon 27, exon 28, exon 29, exon 30, exon 31, exon 32, exon 33, exon 34, exon 35, exon 36, exon 37, exon 38, exon 39, exon 40, exon 41, exon 42, exon 43, exon 44, exon 45, exon 46, exon 47, exon 48, exon 49, exon 50, exon 51, exon 52, exon 53, exon 54, exon 55, exon 56, exon 57, exon 58, exon 59, exon 60, exon 61, exon 62, exon 63, exon 64, exon 65, exon 66, exon 67, exon 68, exon 69, exon 70, exon 71, exon 72, exon 73, exon 74, exon 75, exon 76, exon 77, exon 78, exon 79, intronic regions, synthetic intronic regions, fragments, combinations thereof, or the entire dystrophin gene or cDNA.

[0042] The insertion or correction can be by homology directed repair (HDR).

[0043] The donor template can be a single or double stranded polynucleotide.

[0044] The Cas9 or Cpf1 mRNA, gRNA, and donor template can be each formulated into separate lipid nanoparticles or all co-formulated into a lipid nanoparticle.

[0045] The Cas9 or Cpf1 mRNA can be formulated into a lipid nanoparticle, and both the gRNA and donor template can be delivered to the cell by an adeno-associated virus (AAV) vector.

[0046] The Cas9 or Cpf1 mRNA can be formulated into a lipid nanoparticle, and the gRNA can be delivered to the cell by electroporation and donor template can be delivered to the cell by an adeno-associated virus (AAV) vector.

[0047] The dystrophin gene can be located on Chromosome X: 31,117,228-33,344,609 (Genome Reference Consortium—GRCh38/hg38).

[0048] Also provided herein is one or more guide ribonucleic acids (gRNAs) for editing a dystrophin gene in a cell from a patient with DMD. The one or more gRNAs and/or sgRNAs can comprise a spacer sequence selected from the group consisting of the nucleic acid sequences in SEQ ID Nos: 1-1,410,472 of the Sequence Listing. The one or more gRNAs can be one or more single-molecule guide RNAs (sgRNAs). The one or more gRNAs or one or more sgRNAs can be one or more modified gRNAs or one or more modified sgRNAs.

[0049] Provided herein are cells that have been modified by the preceding methods to permanently delete or correct one or more exons or aberrant intronic splice acceptor or donor sites within the dystrophin gene and restore the dystrophin reading frame and restore the dystrophin protein activity. Further provided herein are methods for ameliorating DMD by the administration of cells that have been modified by the preceding methods to a DMD patient.

[0050] It is understood that the inventions described in this specification are not limited to the examples summarized in this Summary. Various other aspects are described and exemplified herein.

### BRIEF DESCRIPTION OF THE DRAWINGS

[0051] Various aspects of materials and methods for treatment of DMD disclosed and described in this specification can be better understood by reference to the accompanying figures, in which:

[0052] FIG. 1A is a plasmid (CTx-1) comprising a codon optimized gene for S. pyogenes Cas9 endonuclease. The CTx-1 plasmid also comprises a gRNA scaffold sequence, which includes a 20 bp spacer sequence from the sequences listed in SEQ ID NOs: 1-467,030 of the Sequence Listing or a 19 bp spacer sequence from the sequences listed in SEQ ID NOs: 1,410,430-1,410,472 of the Sequence Listing,

[0053] FIG. 1B is a plasmid (CTx-2) comprising a different codon optimized gene for S. pyogenes Cas9 endonuclease. The CTx-2 plasmid also comprises a gRNA scaffold sequence, which includes a 20 bp spacer sequence from the sequences listed in SEQ ID NOs: 1-467,030 of the Sequence Listing or a 19 bp spacer sequence from the sequences listed in SEQ ID NOs: 1,410,430-1,410,472 of the Sequence Listing;

[0054] FIG. 1C is a plasmid (CTx-3) comprising yet another different codon optimized gene for S. pyogenes Cas9 endonuclease. The CTx-3 plasmid also comprises a gRNA scaffold sequence, which includes a 20 bp spacer sequence from the sequences listed in SEQ ID NOs: 1-467,030 of the Sequence Listing or a 19 bp spacer sequence from the sequences listed in SEQ ID NOs: 1,410,430-1,410,472 of the Sequence Listing; and

[0055] FIG. 2A is a depiction of the type II CRISPR/Cas system.

[0056] FIG. 2B is a depiction of the type II CRISPR/Cas system.

[0057] FIG. 3A describes the cutting efficiency of S. pyogenes gRNAs in HEK293Ts targeting Exons 45, 51, and 53 of the dystrophin gene.

[0058] FIG. 3B describes the cutting efficiency of S. pyogenes gRNAs in HEK293Ts targeting Exons 55 and 70 of the dystrophin gene.

[0059] FIG. 4A describes the cutting efficiency of S. pyogenes gRNAs in HEK293Ts targeting the splice acceptor of Exons 43, 44, 45, 46, 50, 51, 52, 53 and 55 of the dystrophin gene.

[0060] FIG. 4B describes the cutting efficiency of N. meningitides, S. thermophiles, and S. aureus gRNAs in HEK293Ts targeting the splice acceptor of Exons 43, 44, 45, 46, 50, 51, 52, 53 and 55 of the dystrophin gene.

[0061] FIG. 4C describes the cutting efficiency of Cpf1 gRNAs in HEK293Ts targeting the splice acceptors of Exons 43, 44, 45, 46, 50, 51, 52, 53 and 55 of the dystrophin gene.

[0062] FIGS. 5A-B describe cutting efficiencies and splice acceptor knock-out efficiencies of S. pyogenes gRNAs in HEK293Ts targeting Exons 51, 45, 53, 44, 46, 52, 50, 43, and 55 of the dystrophin gene.

[0063] FIG. 6 describes cutting efficiencies and splice acceptor knock-out efficiencies of N. meningitides (NM), S. thermophiles (ST), and S. aureus (SA) gRNAs in HEK293Ts targeting Exons 51, 45, 53, 44, 46, 52, 50, 43, and 55 of the dystrophin gene.

[0064] FIG. 7A describes the cutting efficiency of S. pyogenes gRNAs in HEK293T cells where the gRNAs target the regions surrounding Exon 52 of the dystrophin gene.

[0065] FIG. 7B describes the cutting efficiency of S. pyogenes gRNAs in HEK293T cells where the gRNAs target the regions surrounding Exons 44, 45, and 54 of the dystrophin gene.

[0066] FIG. 8A describes the cutting efficiency of S. pyogenes gRNAs in iPSCs where the gRNAs target the regions surrounding Exon 52 of the dystrophin gene.

[0067] FIG. 8B describes the cutting efficiency of S. pyogenes gRNAs in iPSCs where the gRNAs target the regions surrounding Exons 44, 45, and 54 of the dystrophin gene.

[0068] FIG. 9 describes the cutting efficiency comparison of S. pyogenes gRNAs in HEK293T cells and iPSCs where the gRNAs target the regions surrounding Exons 44, 45, 52, and 54 of the dystrophin gene.

[0069] FIG. 10A, FIG. 10B, and FIG. 10C descibe clonal analysis of clonal deletion events.

[0070] FIG. 11A and FIG. 11B describe sanger sequencing of Δ52 clones. SEQ ID NO: 1420000 corresponds to FIG. 11A. SEQ ID NO: 1420001 corresponds to FIG. 11B.

[0071] FIGS. 12A-E describe the cutting efficiencies of gRNAs selected via an in-vitro transcribed (IVT) gRNA screen.

[0072] FIG. 13A describes the homology directed repair (HDR) between Exon 45-55 of the dystrophin gene.

[0073] FIG. 13B depicts the PCR confirmation of HDR at the Exon 45-55 locus of the dystrophin gene.

[0074] FIG. 14A depicts a three primer PCR assay.

[0075] FIG. 14B depicts results from the three primer PCR assay.

[0076] FIG. 14C describes data generated from the three primer PCR assay.

[0077] FIG. 15 describes 5 clones that have the desired Δ45-55 deletion. SEQ ID NO: 1420002 corresponds to clone 20. SEQ ID NO: 1420003 corresponds to clone 56. SEQ ID NO: 1420004 corresponds to clone 69. SEQ ID NO: 1420005 corresponds to clone 74. SEQ ID NO: 1420006 corresponds to clone 100.

[0078] FIGS. 16A-B describes the SSEA-4 Staining and TRA-160 Staining results of the 5 clones that have the desired Δ45-55 deletion.

[0079] FIG. 17 depicts the expression of an internally deleted dystrophin protein for all 5 edited clones.

[0080] FIG. 18 depicts myosin heavy chain staining of differentiated clone 56.

[0081] FIGS. 19A-19W describe the results of a large scale lentiviral screen.

### BRIEF DESCRIPTION OF THE SEQUENCE LISTING

[0082] SEQ ID NOs: 1-467,030 is a list of gRNA 20 bp spacer sequences for targeting the dystrophin gene with a S. pyogenes Cas9 endonuclease.

[0083] SEQ ID NOs: 467,031-528,196 is a list of gRNA 20 bp spacer sequences for targeting the dystrophin gene with a S. aureus Cas9 endonuclease.

[0084] SEQ ID NOs: 528,197-553,198 is a list of gRNA 24 bp spacer sequences for targeting the dystrophin gene with a S. thermophilus Cas9 endonuclease.

[0085] SEQ ID NOs: 553,199-563,911 is a list of gRNA 24 bp spacer sequences for targeting the dystrophin gene with a T. denticola Cas9 endonuclease.

[0086] SEQ ID NOs: 563,912-627,854 is a list of gRNA 24 bp spacer sequences for targeting the dystrophin gene with a N. meningitides Cas9 endonuclease.

[0087] SEQ ID NOs: 627,855-1,410,399 is a list of gRNA 20-24 bp spacer sequences for targeting the dystrophin gene with an Acidominoccoccus, a Lachnospiraceae, and a Franciscella Novicida Cpf1 endonuclease.

[0088] SEQ ID NOs: 1,410,400-1,410,402 is a list of gRNA 24 bp spacer sequences for targeting the dystrophin gene with a N. meningitides Cas9 endonuclease.

[0089] SEQ ID NOs: 1,410,403-1,410,429 is a list of gRNA 23 bp spacer sequences for targeting the dystrophin gene with an Acidominoccoccus, a Lachnospiraceae, and a Franciscella Novicida Cpf1 endonuclease.

[0090] SEQ ID NOs: 1,410,430-1,410,472 is a list of gRNA 19 bp spacer sequences for targeting the dystrophin gene with a S. pyogenes Cas9 endonuclease.

### DETAILED DESCRIPTION

### Duchenne Muscular Dystrophy (DMD)

[0091] DMD is caused by mutations in the dystrophin gene (Chromosome X: 31,117,228-33,344,609 (Genome Reference Consortium—GRCh38/hg38)). With a genomic region of over 2.2 megabases in length, dystrophin is the second largest human gene. The dystrophin gene contains 79 exons that are processed into an 11,000 base pair mRNA that is translated into a 427 kDa protein. Functionally, dystrophin acts as a linker between the actin filaments and the extracellular matrix within muscle fibers. The N terminus of dystrophin is an actin-binding domain, while the C terminus interacts with a transmembrane scaffold that anchors the muscle fiber to the extracellular matrix. Upon muscle contraction, dystrophin provides structural support that allows the muscle tissue to withstand mechanical force. DMD is caused by a wide variety of mutations within the dystrophin gene that result in premature stop codons and therefore a truncated dystrophin protein. Truncated dystrophin proteins do not contain the C terminus, and therefore cannot provide the structural support necessary to withstand the stress of muscle contraction. As a result, the muscle fibers pull themselves apart, which leads to muscle wasting.

### Therapeutic Approach

[0092] Provided herein are cellular, ex vivo and in vivo methods for using genome engineering tools to create permanent changes to the genome that can restore the dystrophin reading frame and restore dystrophin protein activity. Such methods use endonucleases, such as CRISPR/Cas9 nucleases, to permanently delete (excise), insert, or replace (delete and insert) exons (i.e., mutations in the coding and/or splicing sequences) in the genomic locus of the dystrophin gene. In this way, the present invention mimics the product produced by exon skipping, and/or restores the reading frame with as few as a single treatment (rather than deliver exon skipping oligos for the lifetime of the patient). Pre-clinical studies have been performed regarding expression of the C terminus of dystrophin by making targeted changes to the genome using Zinc-Finger-, TALE-, and CRISPR/Cas9-based nucleases. In one example, a large genomic region was deleted that is projected to treat over 60% of the patients with DMD.

[0093] Provided herein are methods for treating a patient with DMD. An example of such method is an ex vivo cell based therapy. For example, a DMD patient specific iPS cell line is created. Then, the chromosomal DNA of these iPS cells is corrected using the materials and methods described herein. Next, the corrected iPSCs are differentiated into Pax7+ muscle progenitor cells. Finally, the progenitor cells are implanted into the patient. There are many advantages to this ex vivo approach.

[0094] One advantage of an ex vivo cell therapy approach is the ability to conduct a comprehensive analysis of the therapeutic prior to administration. All nuclease based therapeutics have some level of off-target effects. Performing gene correction ex vivo allows one to fully characterize the corrected cell population prior to implantation. Aspects of the present disclosure include sequencing the entire genome of the corrected cells to ensure that the off-target cuts, if any, are in genomic locations associated with minimal risk to the patient. Furthermore, clonal populations of cells can be isolated prior to implantation.

[0095] Another advantage of ex vivo cell therapy relates to genetic correction in iPSCs compared to other primary cell sources. iPSCs are prolific, making it easy to obtain the large number of cells that will be required for a cell based therapy. Furthermore, iPSCs are an ideal cell type for performing clonal isolations. This allows screening for the correct genomic correction, without risking a decrease in viability. In contrast, other potential cell types, such as primary myoblasts, are viable for only a few passages and difficult to clonally expand. Also, patient specific DMD myoblasts will be unhealthy due to the lack of dystrophin protein. On the other hand, patient derived DMD iPSCs will not display a diseased phenotype, as they do not express dystrophin in this differentiation state. Therefore, manipulation of DMD iPSCs will be much easier, and will shorten the amount of time needed to make the desired genetic correction.

[0096] A further advantage of ex vivo cell therapy relates to the implantation of myogenic Pax7+ progenitors versus myoblasts. Pax7+ cells are accepted as myogenic satellite cells. Pax7+ progenitors are mono-nuclear cells that sit on the periphery of the multi-nucleated muscle fibers. In response to injury, the progenitors divide and fuse to the existing fibers. In contrast, myoblasts fuse directly to the muscle fiber upon implantation and have minimal proliferative capacity in vivo. Therefore, myoblasts cannot aid in healing following repeated injury, while Pax7+ progenitors can function as a reservoir and help heal the muscle for the lifetime of the patient.

[0097] Another example of such method is an in vivo based therapy. In this method, the chromosomal DNA of the cells in the patient is corrected using the materials and methods described herein.

[0098] The advantage of in vivo gene therapy is the ease of therapeutic production and administration. The same therapeutic cocktail will have the potential to reach a subset of the DMD patient population (n>1). In contrast, the ex vivo cell therapy proposed requires a custom therapeutic to be developed for each patient (n=1). Ex vivo cell therapy development requires time, which certain advanced DMD patients may not have.

[0099] Also provided herein is a cellular method for editing the dystrophin gene in a human cell by genome editing. For example, a cell is isolated from a patient or animal. Then, the chromosomal DNA of the cell is corrected using the materials and methods described herein.

[0100] A number of types of genomic target sites can be present in addition to mutations in the coding and splicing sequences.

[0101] The regulation of transcription and translation implicates a number of different classes of sites that interact with cellular proteins or nucleotides. Often the DNA binding sites of transcription factors or other proteins can be targeted for mutation or deletion to study the role of the site, though they can also be targeted to change gene expression. Sites can be added through non-homologous end joining (NHEJ) or direct genome editing by homology directed repair (HDR). Increased use of genome sequencing, RNA expression and genome-wide studies of transcription factor binding have increased our ability to identify how the sites lead to developmental or temporal gene regulation. These control systems can be direct or can involve extensive cooperative regulation that can require the integration of activities from multiple enhancers. Transcription factors typically bind 6-12 bp-long degenerate DNA sequences. The low level of specificity provided by individual sites suggests that complex interactions and rules are involved in binding and the functional outcome. Binding sites with less degeneracy can provide simpler means of regulation. Artificial transcription factors can be designed to specify longer sequences that have less similar sequences in the genome and have lower potential for off-target cleavage. Any of these types of binding sites can be mutated, deleted or even created to enable changes in gene regulation or expression (Canver, M. C. et al., Nature (2015)).

[0102] Another class of gene regulatory regions having these features is microRNA (miRNA) binding sites. miRNAs are non-coding RNAs that play key roles in post-transcriptional gene regulation. miRNA can regulate the expression of 30% of all mammalian protein-encoding genes. Specific and potent gene silencing by double stranded RNA (RNAi) was discovered, plus additional small noncoding RNA (Canver, M. C. et al., Nature (2015)). The largest class of noncoding RNAs important for gene silencing are miRNAs. In mammals, miRNAs are first transcribed as long RNA transcripts, which can be separate transcriptional units, part of protein introns, or other transcripts. The long transcripts are called primary miRNA (pri-miRNA) that include imperfectly base-paired hairpin structures. These pri-miRNAs can be cleaved into one or more shorter precursor miRNAs (pre-miRNAs) by Microprocessor, a protein complex in the nucleus, involving Drosha.

[0103] Pre-miRNAs are short stem loops ˜70 nucleotides in length with a 2-nucleotide 3′-overhang that are exported, into the mature 19-25 nucleotide miRNA:miRNA* duplexes. The miRNA strand with lower base pairing stability (the guide strand) can be loaded onto the RNA-induced silencing complex (RISC). The passenger guide strand (marked with *), can be functional, but is usually degraded. The mature miRNA tethers RISC to partly complementary sequence motifs in target mRNAs predominantly found within the 3′ untranslated regions (UTRs) and induces posttranscriptional gene silencing (Bartel, D. P. Cell 136, 215-233 (2009); Saj, A. & Lai, E. C. Curr Opin Genet Dev 21, 504-510 (2011)).

[0104] miRNAs can be important in development, differentiation, cell cycle and growth control, and in virtually all biological pathways in mammals and other multicellular organisms. miRNAs can also be involved in cell cycle control, apoptosis and stem cell differentiation, hematopoiesis, hypoxia, muscle development, neurogenesis, insulin secretion, cholesterol metabolism, aging, viral replication and immune responses.

[0105] A single miRNA can target hundreds of different mRNA transcripts, while an individual transcript can be targeted by many different miRNAs. More than 28645 microRNAs have been annotated in the latest release of miRBase (v.21). Some miRNAs can be encoded by multiple loci, some of which can be expressed from tandemly co-transcribed clusters. The features allow for complex regulatory networks with multiple pathways and feedback controls. miRNAs can be integral parts of these feedback and regulatory circuits and can help regulate gene expression by keeping protein production within limits (Herranz, H. & Cohen, S. M. Genes Dev 24, 1339-1344 (2010); Posadas, D. M. & Carthew, R. W. Curr Opin Genet Dev 27, 1-6 (2014)).

[0106] miRNA can also be important in a large number of human diseases that are associated with abnormal miRNA expression. This association underscores the importance of the miRNA regulatory pathway. Recent miRNA deletion studies have linked miRNA with regulation of the immune responses (Stern-Ginossar, N. et al., Science 317, 376-381 (2007)).

[0107] miRNA also have a strong link to cancer and can play a role in different types of cancer. miRNAs have been found to be downregulated in a number of tumors. miRNA can be important in the regulation of key cancer-related pathways, such as cell cycle control and the DNA damage response, and can therefore be used in diagnosis and can be targeted clinically. MicroRNAs can delicately regulate the balance of angiogenesis, such that experiments depleting all microRNAs suppress tumor angiogenesis (Chen, S. et al., Genes Dev 28, 1054-1067 (2014)).

[0108] As has been shown for protein coding genes, miRNA genes can also be subject to epigenetic changes occurring with cancer. Many miRNA loci can be associated with CpG islands increasing their opportunity for regulation by DNA methylation (Weber, B., Stresemann, C., Brueckner, B. & Lyko, F. Cell Cycle 6, 1001-1005 (2007)). The majority of studies have used treatment with chromatin remodeling drugs to reveal epigenetically silenced miRNAs.

[0109] In addition to their role in RNA silencing, miRNA can also activate translation (Posadas, D. M. & Carthew, R. W. Curr Opin Genet Dev 27, 1-6 (2014)). Knocking out these sites can lead to decreased expression of the targeted gene, while introducing these sites can increase expression.

[0110] Individual miRNA can be knocked out most effectively by mutating the seed sequence (bases 2-8 of the microRNA), which can be important for binding specificity. Cleavage in this region, followed by mis-repair by NHEJ can effectively abolish miRNA function by blocking binding to target sites. miRNA could also be inhibited by specific targeting of the special loop region adjacent to the palindromic sequence. Catalytically inactive Cas9 can also be used to inhibit shRNA expression (Zhao, Y. et al., Sci Rep 4, 3943 (2014)). In addition to targeting the miRNA, the binding sites can also be targeted and mutated to prevent the silencing by miRNA.

### Human Cells

[0111] For ameliorating DMD, as described and illustrated herein, the principal targets for gene editing are human cells. For example, in the ex vivo methods, the human cells can be somatic cells, which after being modified using the techniques as described, can give rise to Pax7+ muscle progenitor cells. For example, in the in vivo methods, the human cells can be muscle cells or muscle precursor cells.

[0112] By performing gene editing in autologous cells that are derived from and therefore already completely matched with the patient in need, it is possible to generate cells that can be safely re-introduced into the patient, and effectively give rise to a population of cells that can be effective in ameliorating one or more clinical conditions associated with the patient's disease.

[0113] Progenitor cells (also referred to as stem cells herein) are capable of both proliferation and giving rise to more progenitor cells, these in turn having the ability to generate a large number of mother cells that can in turn give rise to differentiated or differentiable daughter cells. The daughter cells themselves can be induced to proliferate and produce progeny that subsequently differentiate into one or more mature cell types, while also retaining one or more cells with parental developmental potential. The term “stem cell” refers then, to a cell with the capacity or potential, under particular circumstances, to differentiate to a more specialized or differentiated phenotype, and which retains the capacity, under certain circumstances, to proliferate without substantially differentiating. In one aspect, the term progenitor or stem cell refers to a generalized mother cell whose descendants (progeny) specialize, often in different directions, by differentiation, e.g., by acquiring completely individual characters, as occurs in progressive diversification of embryonic cells and tissues. Cellular differentiation is a complex process typically occurring through many cell divisions. A differentiated cell can derive from a multipotent cell that itself is derived from a multipotent cell, and so on. While each of these multipotent cells can be considered stem cells, the range of cell types that each can give rise to can vary considerably. Some differentiated cells also have the capacity to give rise to cells of greater developmental potential. Such capacity can be natural or may be induced artificially upon treatment with various factors. In many biological instances, stem cells can be also “multipotent” because they can produce progeny of more than one distinct cell type, but this is not required for “stem-ness.”

[0114] Self-renewal can be another important aspect of the stem cell. In theory, self-renewal can occur by either of two major mechanisms. Stem cells can divide asymmetrically, with one daughter retaining the stem state and the other daughter expressing some distinct other specific function and phenotype. Alternatively, some of the stem cells in a population can divide symmetrically into two stems, thus maintaining some stem cells in the population as a whole, while other cells in the population give rise to differentiated progeny only. Generally, “progenitor cells” have a cellular phenotype that is more primitive (i.e., is at an earlier step along a developmental pathway or progression than is a fully differentiated cell). Often, progenitor cells also have significant or very high proliferative potential. Progenitor cells can give rise to multiple distinct differentiated cell types or to a single differentiated cell type, depending on the developmental pathway and on the environment in which the cells develop and differentiate.

[0115] In the context of cell ontogeny, the adjective “differentiated,” or “differentiating” is a relative term. A “differentiated cell” is a cell that has progressed further down the developmental pathway than the cell to which it is being compared. Thus, stem cells can differentiate into lineage-restricted precursor cells (such as a myocyte progenitor cell), which in turn can differentiate into other types of precursor cells further down the pathway (such as a myocyte precursor), and then to an end-stage differentiated cell, such as a myocyte, which plays a characteristic role in a certain tissue type, and may or may not retain the capacity to proliferate further.

### Induced Pluripotent Stem Cells

[0116] In some examples, the genetically engineered human cells described herein can be induced pluripotent stem cells (iPSCs). An advantage of using iPSCs is that the cells can be derived from the same subject to which the progenitor cells are to be administered. That is, a somatic cell can be obtained from a subject, reprogrammed to an induced pluripotent stem cell, and then re-differentiated into a progenitor cell to be administered to the subject (e.g., autologous cells). Because the progenitors are essentially derived from an autologous source, the risk of engraftment rejection or allergic response can be reduced compared to the use of cells from another subject or group of subjects. In addition, the use of iPSCs negates the need for cells obtained from an embryonic source. Thus, in one aspect, the stem cells used in the disclosed methods are not embryonic stem cells.

[0117] Although differentiation is generally irreversible under physiological contexts, several methods have been recently developed to reprogram somatic cells to iPSCs. Exemplary methods are known to those of skill in the art and are described briefly herein below.

[0118] The term “reprogramming” refers to a process that alters or reverses the differentiation state of a differentiated cell (e.g., a somatic cell). Stated another way, reprogramming refers to a process of driving the differentiation of a cell backwards to a more undifferentiated or more primitive type of cell. It should be noted that placing many primary cells in culture can lead to some loss of fully differentiated characteristics. Thus, simply culturing such cells included in the term differentiated cells does not render these cells non-differentiated cells (e.g., undifferentiated cells) or pluripotent cells. The transition of a differentiated cell to pluripotency requires a reprogramming stimulus beyond the stimuli that lead to partial loss of differentiated character in culture. Reprogrammed cells also have the characteristic of the capacity of extended passaging without loss of growth potential, relative to primary cell parents, which generally have capacity for only a limited number of divisions in culture.

[0119] The cell to be reprogrammed can be either partially or terminally differentiated prior to reprogramming. Reprogramming encompasses complete reversion of the differentiation state of a differentiated cell (e.g., a somatic cell) to a pluripotent state or a multipotent state. Reprogramming can encompass complete or partial reversion of the differentiation state of a differentiated cell (e.g., a somatic cell) to an undifferentiated cell (e.g., an embryonic-like cell). Reprogramming can result in expression of particular genes by the cells, the expression of which further contributes to reprogramming. In certain examples described herein, reprogramming of a differentiated cell (e.g., a somatic cell) can cause the differentiated cell to assume an undifferentiated state (e.g., is an undifferentiated cell). The resulting cells are referred to as “reprogrammed cells,” or “induced pluripotent stem cells (iPSCs or iPS cells).”

[0120] Reprogramming can involve alteration, e.g., reversal, of at least some of the heritable patterns of nucleic acid modification (e.g., methylation), chromatin condensation, epigenetic changes, genomic imprinting, etc., that occur during cellular differentiation. Reprogramming is distinct from simply maintaining the existing undifferentiated state of a cell that is already pluripotent or maintaining the existing less than fully differentiated state of a cell that is already a multipotent cell (e.g., a myogenic stem cell). Reprogramming is also distinct from promoting the self-renewal or proliferation of cells that are already pluripotent or multipotent, although the compositions and methods described herein can also be of use for such purposes, in some examples.

[0121] Many methods are known in the art that can be used to generate pluripotent stem cells from somatic cells. Any such method that reprograms a somatic cell to the pluripotent phenotype would be appropriate for use in the methods described herein.

[0122] Reprogramming methodologies for generating pluripotent cells using defined combinations of transcription factors have been described. Mouse somatic cells can be converted to ES cell-like cells with expanded developmental potential by the direct transduction of Oct4, Sox2, Klf4, and c-Myc; see, e.g., Takahashi and Yamanaka, Cell 126(4): 663-76 (2006). iPSCs resemble ES cells, as they restore the pluripotency-associated transcriptional circuitry and much of the epigenetic landscape. In addition, mouse iPSCs satisfy all the standard assays for pluripotency: specifically, in vitro differentiation into cell types of the three germ layers, teratoma formation, contribution to chimeras, germline transmission [see, e.g., Maherali and Hochedlinger, Cell Stem Cell. 3(6):595-605 (2008)], and tetraploid complementation.

[0123] Human iPSCs can be obtained using similar transduction methods, and the transcription factor trio, OCT4, SOX2, and NANOG, has been established as the core set of transcription factors that govern pluripotency; see, e.g., Budniatzky and Gepstein, Stem Cells Transl Med. 3(4):448-57 (2014); Barrett et al., Stem Cells Trans Med 3:1-6 sctm.2014-0121 (2014); Focosi et al., Blood Cancer Journal 4: e211 (2014); and references cited therein. The production of iPSCs can be achieved by the introduction of nucleic acid sequences encoding stem cell-associated genes into an adult, somatic cell, historically using viral vectors.

[0124] iPSCs can be generated or derived from terminally differentiated somatic cells, as well as from adult stem cells, or somatic stem cells. That is, a non-pluripotent progenitor cell can be rendered pluripotent or multipotent by reprogramming. In such instances, it may not be necessary to include as many reprogramming factors as required to reprogram a terminally differentiated cell. Further, reprogramming can be induced by the non-viral introduction of reprogramming factors, e.g., by introducing the proteins themselves, or by introducing nucleic acids that encode the reprogramming factors, or by introducing messenger RNAs that upon translation produce the reprogramming factors (see e.g., Warren et al., Cell Stem Cell, 7(5):618-30 (2010). Reprogramming can be achieved by introducing a combination of nucleic acids encoding stem cell-associated genes, including, for example, Oct-4 (also known as Oct-3/4 or Pouf51), Sox1, Sox2, Sox3, Sox 15, Sox 18, NANOG, Klf1, Klf2, Klf4, Klf5, NR5A2, c-Myc, 1-Myc, n-Myc, Rem2, Tert, and LIN28. Reprogramming using the methods and compositions described herein can further comprise introducing one or more of Oct-3/4, a member of the Sox family, a member of the Klf family, and a member of the Myc family to a somatic cell. The methods and compositions described herein can further comprise introducing one or more of each of Oct-4, Sox2, Nanog, c-MYC and Klf4 for reprogramming. As noted above, the exact method used for reprogramming is not necessarily critical to the methods and compositions described herein. However, where cells differentiated from the reprogrammed cells are to be used in, e.g., human therapy, in one aspect the reprogramming is not effected by a method that alters the genome. Thus, in such examples, reprogramming can be achieved, e.g., without the use of viral or plasmid vectors.

[0125] The efficiency of reprogramming (i.e., the number of reprogrammed cells) derived from a population of starting cells can be enhanced by the addition of various agents, e.g., small molecules, as shown by Shi et al., Cell-Stem Cell 2:525-528 (2008); Huangfu et al., Nature Biotechnology 26(7):795-797 (2008) and Marson et al., Cell-Stem Cell 3: 132-135 (2008). Thus, an agent or combination of agents that enhance the efficiency or rate of induced pluripotent stem cell production can be used in the production of patient-specific or disease-specific iPSCs. Some non-limiting examples of agents that enhance reprogramming efficiency include soluble Wnt, Wnt conditioned media, BIX-01294 (a G9a histone methyltransferase), PD0325901 (a MEK inhibitor), DNA methyltransferase inhibitors, histone deacetylase (HDAC) inhibitors, valproic acid, 5′-azacytidine, dexamethasone, suberoylanilide, hydroxamic acid (SAHA), vitamin C, and trichostatin (TSA), among others.

[0126] Other non-limiting examples of reprogramming enhancing agents include: Suberoylanilide Hydroxamic Acid (SAHA (e.g., MK0683, vorinostat) and other hydroxamic acids), BML-210, Depudecin (e.g., (−)-Depudecin), HC Toxin, Nullscript (4-(1,3-Dioxo-1H,3H-benzo[de]isoquinolin-2-yl)-N-hydroxybutanamide), Phenylbutyrate (e.g., sodium phenylbutyrate) and Valproic Acid ((VP A) and other short chain fatty acids), Scriptaid, Suramin Sodium, Trichostatin A (TSA), APHA Compound 8, Apicidin, Sodium Butyrate, pivaloyloxymethyl butyrate (Pivanex, AN-9), Trapoxin B, Chlamydocin, Depsipeptide (also known as FR901228 or FK228), benzamides (e.g., Cl-994 (e.g., N-acetyl dinaline) and MS-27-275), MGCD0103, NVP-LAQ-824, CBHA (m-carboxycinnaminic acid bishydroxamic acid), JNJ16241199, Tubacin, A-161906, proxamide, oxamflatin, 3-Cl-UCHA (e.g., 6-(3-chlorophenylureido)caproic hydroxamic acid), AOE (2-amino-8-oxo-9, 10-epoxydecanoic acid), CHAP31 and CHAP 50. Other reprogramming enhancing agents include, for example, dominant negative forms of the HDACs (e.g., catalytically inactive forms), siRNA inhibitors of the HDACs, and antibodies that specifically bind to the HDACs. Such inhibitors are available, e.g., from BIOMOL International, Fukasawa, Merck Biosciences, Novartis, Gloucester Pharmaceuticals, Titan Pharmaceuticals, MethylGene, and Sigma Aldrich.

[0127] To confirm the induction of pluripotent stem cells for use with the methods described herein, isolated clones can be tested for the expression of a stem cell marker. Such expression in a cell derived from a somatic cell identifies the cells as induced pluripotent stem cells. Stem cell markers can be selected from the non-limiting group including SSEA3, SSEA4, CD9, Nanog, Fbxl5, Ecatl, Esgl, Eras, Gdf3, Fgf4, Cripto, Dax1, Zpf296, Slc2a3, Rex1, Utfl, and Natl. In one case, for example, a cell that expresses Oct4 or Nanog is identified as pluripotent. Methods for detecting the expression of such markers can include, for example, RT-PCR and immunological methods that detect the presence of the encoded polypeptides, such as Western blots or flow cytometric analyses. Detection can involve, not only RT-PCR, but can also include detection of protein markers. Intracellular markers can be best identified via RT-PCR, or protein detection methods such as immunocytochemistry, while cell surface markers are readily identified, e.g., by immunocytochemistry.

[0128] The pluripotent stem cell character of isolated cells can be confirmed by tests evaluating the ability of the iPSCs to differentiate into cells of each of the three germ layers. As one example, teratoma formation in nude mice can be used to evaluate the pluripotent character of the isolated clones. The cells can be introduced into nude mice and histology and/or immunohistochemistry can be performed on a tumor arising from the cells. The growth of a tumor comprising cells from all three germ layers, for example, further indicates that the cells are pluripotent stem cells.

Creating DMD Patient Specific iPSCs

[0129] One step of the ex vivo methods of the present disclosure can involve creating a DMD patient specific iPS cell, DMD patient specific iPS cells, or a DMD patient specific iPS cell line. There are many established methods in the art for creating patient specific iPS cells, as described in Takahashi and Yamanaka 2006; Takahashi, Tanabe et al. 2007. In addition, differentiation of pluripotent cells toward the muscle lineage can be accomplished by technology developed by Anagenesis Biotechnologies, as described in International patent application publication numbers WO2013/030243 and WO2012/101114. For example, the creating step can comprise: a) isolating a somatic cell, such as a skin cell or fibroblast from the patient; and b) introducing a set of pluripotency-associated genes into the somatic cell in order to induce the cell to become a pluripotent stem cell. The set of pluripotency-associated genes can be one or more of the genes selected from the group consisting of OCT4, SOX2, KLF4, Lin28, NANOG, and cMYC.

### Genome Editing

[0130] Genome editing generally refers to the process of modifying the nucleotide sequence of a genome, preferably in a precise or pre-determined manner. Examples of methods of genome editing described herein include methods of using site-directed nucleases to cut deoxyribonucleic acid (DNA) at precise target locations in the genome, thereby creating single-strand or double-strand DNA breaks at particular locations within the genome. Such breaks can be and regularly are repaired by natural, endogenous cellular processes, such as homology-directed repair (HDR) and non-homologous end-joining (NHEJ), as recently reviewed in Cox et al., Nature Medicine 21(2), 121-31 (2015). NHEJ directly joins the DNA ends resulting from a double-strand break, sometimes with the loss or addition of nucleotide sequence, which can disrupt or enhance gene expression. HDR utilizes a homologous sequence, or donor sequence, as a template for inserting a defined DNA sequence at the break point. The homologous sequence can be in the endogenous genome, such as a sister chromatid. Alternatively, the donor can be an exogenous nucleic acid, such as a plasmid, a single-strand oligonucleotide, a double-strand oligonucleotide, a duplex oligonucleotide or a virus, that has regions of high homology with the nuclease-cleaved locus, but which can also contain additional sequence or sequence changes including deletions that can be incorporated into the cleaved target locus. A third repair mechanism can be microhomology-mediated end joining (MMEJ), also referred to as “Alternative NHEJ”, in which the genetic outcome is similar to NHEJ in that small deletions and insertions can occur at the cleavage site. MMEJ can make use of homologous sequences of a few basepairs flanking the DNA break site to drive a more favored DNA end joining repair outcome, and recent reports have further elucidated the molecular mechanism of this process; see, e.g., Cho and Greenberg, Nature 518, 174-76 (2015); Kent et al., Nature Structural and Molecular Biology, Adv. Online doi:10.1038/nsmb.2961(2015); Mateos-Gomez et al., Nature 518, 254-57 (2015); Ceccaldi et al., Nature 528, 258-62 (2015). In some instances it may be possible to predict likely repair outcomes based on analysis of potential microhomologies at the site of the DNA break.

[0131] Each of these genome editing mechanisms can be used to create desired genomic alterations. A step in the genome editing process can be to create one or two DNA breaks, the latter as double-strand breaks or as two single-stranded breaks, in the target locus as close as near to the site of intended mutation. This can be achieved via the use of site-directed polypeptides, as described and illustrated herein.

[0132] Site-directed polypeptides, such as a DNA endonuclease, can introduce double-strand breaks or single-strand breaks in nucleic acids, e.g., genomic DNA. The double-strand break can stimulate a cell's endogenous DNA-repair pathways (e.g., homology-dependent repair or non-homologous end joining or alternative non-homologous end joining (A-NHEJ) or microhomology-mediated end joining). NHEJ can repair cleaved target nucleic acid without the need for a homologous template. This can sometimes result in small deletions or insertions (indels) in the target nucleic acid at the site of cleavage, and can lead to disruption or alteration of gene expression. HDR can occur when a homologous repair template, or donor, is available. The homologous donor template can comprise sequences that can be homologous to sequences flanking the target nucleic acid cleavage site. The sister chromatid can be used by the cell as the repair template. However, for the purposes of genome editing, the repair template can be supplied as an exogenous nucleic acid, such as a plasmid, duplex oligonucleotide, single-strand oligonucleotide, double-stranded oligonucleotide, or viral nucleic acid. With exogenous donor templates, an additional nucleic acid sequence (such as a transgene) or modification (such as a single or multiple base change or a deletion) can be introduced between the flanking regions of homology so that the additional or altered nucleic acid sequence also becomes incorporated into the target locus. MMEJ can result in a genetic outcome that is similar to NHEJ in that small deletions and insertions can occur at the cleavage site. MMEJ can make use of homologous sequences of a few basepairs flanking the cleavage site to drive a favored end-joining DNA repair outcome. In some instances it may be possible to predict likely repair outcomes based on analysis of potential microhomologies in the nuclease target regions.

[0133] Thus, in some cases, homologous recombination can be used to insert an exogenous polynucleotide sequence into the target nucleic acid cleavage site. An exogenous polynucleotide sequence is termed a donor polynucleotide (or donor or donor sequence or polynucleotide donor template) herein. The donor polynucleotide, a portion of the donor polynucleotide, a copy of the donor polynucleotide, or a portion of a copy of the donor polynucleotide can be inserted into the target nucleic acid cleavage site. The donor polynucleotide can be an exogenous polynucleotide sequence, i.e., a sequence that does not naturally occur at the target nucleic acid cleavage site.

[0134] The modifications of the target DNA due to NHEJ and/or HDR can lead to, for example, mutations, deletions, alterations, integrations, gene correction, gene replacement, gene tagging, transgene insertion, nucleotide deletion, gene disruption, translocations and/or gene mutation. The processes of deleting genomic DNA and integrating non-native nucleic acid into genomic DNA are examples of genome editing.

### CRISPR Endonuclease System

[0135] A CRISPR (Clustered Regularly Interspaced Short Palindromic Repeats) genomic locus can be found in the genomes of many prokaryotes (e.g., bacteria and archaea). In prokaryotes, the CRISPR locus encodes products that function as a type of immune system to help defend the prokaryotes against foreign invaders, such as virus and phage. There are three stages of CRISPR locus function: integration of new sequences into the CRISPR locus, expression of CRISPR RNA (crRNA), and silencing of foreign invader nucleic acid. Five types of CRISPR systems (e.g., Type I, Type II, Type III, Type U, and Type V) have been identified.

[0136] A CRISPR locus includes a number of short repeating sequences referred to as “repeats.” When expressed, the repeats can form secondary structures (e.g., hairpins) and/or comprise unstructured single-stranded sequences. The repeats usually occur in clusters and frequently diverge between species. The repeats are regularly interspaced with unique intervening sequences referred to as “spacers,” resulting in a repeat-spacer-repeat locus architecture. The spacers are identical to or have high homology with known foreign invader sequences. A spacer-repeat unit encodes a crisprRNA (crRNA), which is processed into a mature form of the spacer-repeat unit. A crRNA comprises a “seed” or spacer sequence that is involved in targeting a target nucleic acid (in the naturally occurring form in prokaryotes, the spacer sequence targets the foreign invader nucleic acid). A spacer sequence is located at the 5′ or 3′ end of the crRNA.

[0137] A CRISPR locus also comprises polynucleotide sequences encoding CRISPR Associated (Cas) genes. Cas genes encode endonucleases involved in the biogenesis and the interference stages of crRNA function in prokaryotes. Some Cas genes comprise homologous secondary and/or tertiary structures.

### Type II CRISPR Systems

[0138] crRNA biogenesis in a Type II CRISPR system in nature requires a trans-activating CRISPR RNA (tracrRNA). The tracrRNA can be modified by endogenous RNaseIII, and then hybridizes to a crRNA repeat in the pre-crRNA array. Endogenous RNaseIII can be recruited to cleave the pre-crRNA. Cleaved crRNAs can be subjected to exoribonuclease trimming to produce the mature crRNA form (e.g., 5′ trimming). The tracrRNA can remain hybridized to the crRNA, and the tracrRNA and the crRNA associate with a site-directed polypeptide (e.g., Cas9). The crRNA of the crRNA-tracrRNA-Cas9 complex can guide the complex to a target nucleic acid to which the crRNA can hybridize. Hybridization of the crRNA to the target nucleic acid can activate Cas9 for targeted nucleic acid cleavage. The target nucleic acid in a Type II CRISPR system is referred to as a protospacer adjacent motif (PAM). In nature, the PAM is essential to facilitate binding of a site-directed polypeptide (e.g., Cas9) to the target nucleic acid. Type II systems (also referred to as Nmeni or CASS4) are further subdivided into Type II-A (CASS4) and II-B (CASS4a). Jinek et al., Science, 337(6096):816-821 (2012) showed that the CRISPR/Cas9 system is useful for RNA-programmable genome editing, and international patent application publication number WO2013/176772 provides numerous examples and applications of the CRISPR/Cas endonuclease system for site-specific gene editing.

### Type V CRISPR Systems

[0139] Type V CRISPR systems have several important differences from Type II systems. For example, Cpf1 is a single RNA-guided endonuclease that, in contrast to Type II systems, lacks tracrRNA. In fact, Cpf1-associated CRISPR arrays can be processed into mature crRNAs without the requirement of an additional trans-activating tracrRNA. The Type V CRISPR array can be processed into short mature crRNAs of 42-44 nucleotides in length, with each mature crRNA beginning with 19 nucleotides of direct repeat followed by 23-25 nucleotides of spacer sequence. In contrast, mature crRNAs in Type II systems can start with 20-24 nucleotides of spacer sequence followed by about 22 nucleotides of direct repeat. Also, Cpf1 can utilize a T-rich protospacer-adjacent motif such that Cpf1-crRNA complexes efficiently cleave target DNA preceded by a short T-rich PAM, which is in contrast to the G-rich PAM following the target DNA for Type II systems. Thus, Type V systems cleave at a point that is distant from the PAM, while Type II systems cleave at a point that is adjacent to the PAM. In addition, in contrast to Type II systems, Cpf1 cleaves DNA via a staggered DNA double-stranded break with a 4 or 5 nucleotide 5′ overhang. Type II systems cleave via a blunt double-stranded break. Similar to Type II systems, Cpf1 contains a predicted RuvC-like endonuclease domain, but lacks a second HNH endonuclease domain, which is in contrast to Type II systems.

### Cas Genes/Polypeptides and Protospacer Adjacent Motifs

[0140] Exemplary CRISPR/Cas polypeptides include the Cas9 polypeptides in FIG. 1 of Fonfara et al., Nucleic Acids Research, 42: 2577-2590 (2014). The CRISPR/Cas gene naming system has undergone extensive rewriting since the Cas genes were discovered. FIG. 5 of Fonfara, supra, provides PAM sequences for the Cas9 polypeptides from various species.

### Site-Directed Polypeptides

[0141] A site-directed polypeptide is a nuclease used in genome editing to cleave DNA. The site-directed can be administered to a cell or a patient as either: one or more polypeptides, or one or more mRNAs encoding the polypeptide.

[0142] In the context of a CRISPR/Cas or CRISPR/Cpf1 system, the site-directed polypeptide can bind to a guide RNA that, in turn, specifies the site in the target DNA to which the polypeptide is directed. In the CRISPR/Cas or CRISPR/Cpf1 systems disclosed herein, the site-directed polypeptide can be an endonuclease, such as a DNA endonuclease.

[0143] A site-directed polypeptide can comprise a plurality of nucleic acid-cleaving (i.e., nuclease) domains. Two or more nucleic acid-cleaving domains can be linked together via a linker. For example, the linker can comprise a flexible linker. Linkers can comprise 1, 2, 3, 4, 5, 6, 7, 8, 9, 10, 11, 12, 13, 14, 15, 16, 17, 18, 19, 20, 21, 22, 23, 24, 25, 30, 35, 40 or more amino acids in length.

[0144] Naturally-occurring wild-type Cas9 enzymes comprise two nuclease domains, a HNH nuclease domain and a RuvC domain. Herein, the “Cas9” refers to both naturally-occurring and recombinant Cas9s. Cas9 enzymes contemplated herein can comprise a HNH or HNH-like nuclease domain, and/or a RuvC or RuvC-like nuclease domain.

[0145] HNH or HNH-like domains comprise a McrA-like fold. HNH or HNH-like domains comprises two antiparallel β-strands and an α-helix. HNH or HNH-like domains comprises a metal binding site (e.g., a divalent cation binding site). HNH or HNH-like domains can cleave one strand of a target nucleic acid (e.g., the complementary strand of the crRNA targeted strand).

[0146] RuvC or RuvC-like domains comprise an RNaseH or RNaseH-like fold. RuvC/RNaseH domains are involved in a diverse set of nucleic acid-based functions including acting on both RNA and DNA. The RNaseH domain comprises 5 β-strands surrounded by a plurality of α-helices. RuvC/RNaseH or RuvC/RNaseH-like domains comprise a metal binding site (e.g., a divalent cation binding site). RuvC/RNaseH or RuvC/RNaseH-like domains can cleave one strand of a target nucleic acid (e.g., the non-complementary strand of a double-stranded target DNA).

[0147] Site-directed polypeptides can introduce double-strand breaks or single-strand breaks in nucleic acids, e.g., genomic DNA. The double-strand break can stimulate a cell's endogenous DNA-repair pathways (e.g., homology-dependent repair (HDR) or non-homologous end joining (NHEJ) or alternative non-homologous end joining (A-NHEJ) or microhomology-mediated end joining (MMEJ)). NHEJ can repair cleaved target nucleic acid without the need for a homologous template. This can sometimes result in small deletions or insertions (indels) in the target nucleic acid at the site of cleavage, and can lead to disruption or alteration of gene expression. HDR can occur when a homologous repair template, or donor, is available. The homologous donor template can comprise sequences that are homologous to sequences flanking the target nucleic acid cleavage site. The sister chromatid can be used by the cell as the repair template. However, for the purposes of genome editing, the repair template can be supplied as an exogenous nucleic acid, such as a plasmid, duplex oligonucleotide, single-strand oligonucleotide or viral nucleic acid. With exogenous donor templates, an additional nucleic acid sequence (such as a transgene) or modification (such as a single or multiple base change or a deletion) can be introduced between the flanking regions of homology so that the additional or altered nucleic acid sequence also becomes incorporated into the target locus. MMEJ can result in a genetic outcome that is similar to NHEJ in that small deletions and insertions can occur at the cleavage site. MMEJ can make use of homologous sequences of a few basepairs flanking the cleavage site to drive a favored end-joining DNA repair outcome. In some instances it may be possible to predict likely repair outcomes based on analysis of potential microhomologies in the nuclease target regions.

[0148] Thus, in some cases, homologous recombination is used to insert an exogenous polynucleotide sequence into the target nucleic acid cleavage site. An exogenous polynucleotide sequence is termed a donor polynucleotide (or donor or donor sequence) herein. The donor polynucleotide, a portion of the donor polynucleotide, a copy of the donor polynucleotide, or a portion of a copy of the donor polynucleotide can be inserted into the target nucleic acid cleavage site. The donor polynucleotide can be an exogenous polynucleotide sequence, i.e., a sequence that does not naturally occur at the target nucleic acid cleavage site.

[0149] The modifications of the target DNA due to NHEJ and/or HDR can lead to, for example, mutations, deletions, alterations, integrations, gene correction, gene replacement, gene tagging, transgene insertion, nucleotide deletion, gene disruption, translocations and/or gene mutation. The processes of deleting genomic DNA and integrating non-native nucleic acid into genomic DNA are examples of genome editing.

[0150] The site-directed polypeptide can comprise an amino acid sequence having at least 10%, at least 15%, at least 20%, at least 30%, at least 40%, at least 50%, at least 60%, at least 70%, at least 75%, at least 80%, at least 85%, at least 90%, at least 95%, at least 99%, or 100% amino acid sequence identity to a wild-type exemplary site-directed polypeptide [e.g., Cas9 from S. pyogenes, US2014/0068797 Sequence ID No. 8 or Sapranauskas et al., Nucleic Acids Res, 39(21): 9275-9282 (2011)], and various other site-directed polypeptides).

[0151] The site-directed polypeptide comprises at least 70, 75, 80, 85, 90, 95, 97, 99, or 100% identity to a wild-type site-directed polypeptide (e.g., Cas9 from S. pyogenes, supra) over 10 contiguous amino acids. The site-directed polypeptide can comprise at most: 70, 75, 80, 85, 90, 95, 97, 99, or 100% identity to a wild-type site-directed polypeptide (e.g., Cas9 from S. pyogenes, supra) over 10 contiguous amino acids. The site-directed polypeptide can comprise at least: 70, 75, 80, 85, 90, 95, 97, 99, or 100% identity to a wild-type site-directed polypeptide (e.g., Cas9 from S. pyogenes, supra) over 10 contiguous amino acids in a HNH nuclease domain of the site-directed polypeptide. The site-directed polypeptide can comprise at most: 70, 75, 80, 85, 90, 95, 97, 99, or 100% identity to a wild-type site-directed polypeptide (e.g., Cas9 from S. pyogenes, supra) over 10 contiguous amino acids in a HNH nuclease domain of the site-directed polypeptide. The site-directed polypeptide can comprise at least: 70, 75, 80, 85, 90, 95, 97, 99, or 100% identity to a wild-type site-directed polypeptide (e.g., Cas9 from S. pyogenes, supra) over 10 contiguous amino acids in a RuvC nuclease domain of the site-directed polypeptide. The site-directed polypeptide comprises at most: 70, 75, 80, 85, 90, 95, 97, 99, or 100% identity to a wild-type site-directed polypeptide (e.g., Cas9 from S. pyogenes, supra) over 10 contiguous amino acids in a RuvC nuclease domain of the site-directed polypeptide.

[0152] The site-directed polypeptide can comprise a modified form of a wild-type exemplary site-directed polypeptide. The modified form of the wild-type exemplary site-directed polypeptide can comprise a mutation that reduces the nucleic acid-cleaving activity of the site-directed polypeptide. The modified form of the wild-type exemplary site-directed polypeptide can have less than 90%, less than 80%, less than 70%, less than 60%, less than 50%, less than 40%, less than 30%, less than 20%, less than 10%, less than 5%, or less than 1% of the nucleic acid-cleaving activity of the wild-type exemplary site-directed polypeptide (e.g., Cas9 from S. pyogenes, supra). The modified form of the site-directed polypeptide can have no substantial nucleic acid-cleaving activity. When a site-directed polypeptide is a modified form that has no substantial nucleic acid-cleaving activity, it is referred to herein as “enzymatically inactive.”

[0153] The modified form of the site-directed polypeptide can comprise a mutation such that it can induce a single-strand break (SSB) on a target nucleic acid (e.g., by cutting only one of the sugar-phosphate backbones of a double-strand target nucleic acid). The mutation can result in less than 90%, less than 80%, less than 70%, less than 60%, less than 50%, less than 40%, less than 30%, less than 20%, less than 10%, less than 5%, or less than 1% of the nucleic acid-cleaving activity in one or more of the plurality of nucleic acid-cleaving domains of the wild-type site directed polypeptide (e.g., Cas9 from S. pyogenes, supra). The mutation can result in one or more of the plurality of nucleic acid-cleaving domains retaining the ability to cleave the complementary strand of the target nucleic acid, but reducing its ability to cleave the non-complementary strand of the target nucleic acid. The mutation can result in one or more of the plurality of nucleic acid-cleaving domains retaining the ability to cleave the non-complementary strand of the target nucleic acid, but reducing its ability to cleave the complementary strand of the target nucleic acid. For example, residues in the wild-type exemplary S. pyogenes Cas9 polypeptide, such as Asp10, His840, Asn854 and Asn856, are mutated to inactivate one or more of the plurality of nucleic acid-cleaving domains (e.g., nuclease domains). The residues to be mutated can correspond to residues Asp10, His840, Asn854 and Asn856 in the wild-type exemplary S. pyogenes Cas9 polypeptide (e.g., as determined by sequence and/or structural alignment). Non-limiting examples of mutations include D10A, H840A, N854A or N856A. One skilled in the art will recognize that mutations other than alanine substitutions can be suitable.

[0154] A D10A mutation can be combined with one or more of H840A, N854A, or N856A mutations to produce a site-directed polypeptide substantially lacking DNA cleavage activity. A H840A mutation can be combined with one or more of D10A, N854A, or N856A mutations to produce a site-directed polypeptide substantially lacking DNA cleavage activity. A N854A mutation can be combined with one or more of H840A, D10A, or N856A mutations to produce a site-directed polypeptide substantially lacking DNA cleavage activity. A N856A mutation can be combined with one or more of H840A, N854A, or D10A mutations to produce a site-directed polypeptide substantially lacking DNA cleavage activity. Site-directed polypeptides that comprise one substantially inactive nuclease domain are referred to as “nickases”.

[0155] Nickase variants of RNA guided endonucleases, for example Cas9, can be used to increase the specificity of CRISPR-mediated genome editing. Wild type Cas9 is typically guided by a single guide RNA designed to hybridize with a specified ˜20 nucleotide sequence in the target sequence (such as an endogenous genomic locus). However, several mismatches can be tolerated between the guide RNA and the target locus, effectively reducing the length of required homology in the target site to, for example, as little as 13 nt of homology, and thereby resulting in elevated potential for binding and double-strand nucleic acid cleavage by the CRISPR/Cas9 complex elsewhere in the target genome—also known as off-target cleavage. Because nickase variants of Cas9 each only cut one strand, in order to create a double-strand break it is necessary for a pair of nickases to bind in close proximity and on opposite strands of the target nucleic acid, thereby creating a pair of nicks, which is the equivalent of a double-strand break. This requires that two separate guide RNAs—one for each nickase—must bind in close proximity and on opposite strands of the target nucleic acid. This requirement essentially doubles the minimum length of homology needed for the double-strand break to occur, thereby reducing the likelihood that a double-strand cleavage event will occur elsewhere in the genome, where the two guide RNA sites—if they exist—are unlikely to be sufficiently close to each other to enable the double-strand break to form. As described in the art, nickases can also be used to promote HDR versus NHEJ. HDR can be used to introduce selected changes into target sites in the genome through the use of specific donor sequences that effectively mediate the desired changes. Descriptions of various CRISPR/Cas systems for use in gene editing can be found, e.g., in international patent application publication number WO2013/176772, and in Nature Biotechnology 32, 347-355 (2014), and references cited therein.

[0156] Mutations contemplated can include substitutions, additions, and deletions, or any combination thereof. The mutation converts the mutated amino acid to alanine. The mutation converts the mutated amino acid to another amino acid (e.g., glycine, serine, threonine, cysteine, valine, leucine, isoleucine, methionine, proline, phenylalanine, tyrosine, tryptophan, aspartic acid, glutamic acid, asparagines, glutamine, histidine, lysine, or arginine). The mutation converts the mutated amino acid to a natural amino acid (e.g., selenomethionine). The mutation converts the mutated amino acid to amino acid mimics (e.g., phosphomimics). The mutation can be a conservative mutation. For example, the mutation can convert the mutated amino acid to amino acids that resemble the size, shape, charge, polarity, conformation, and/or rotamers of the mutated amino acids (e.g., cysteine/serine mutation, lysine/asparagine mutation, histidine/phenylalanine mutation). The mutation can cause a shift in reading frame and/or the creation of a premature stop codon. Mutations can cause changes to regulatory regions of genes or loci that affect expression of one or more genes.

[0157] The site-directed polypeptide (e.g., variant, mutated, enzymatically inactive and/or conditionally enzymatically inactive site-directed polypeptide) can target nucleic acid. The site-directed polypeptide (e.g., variant, mutated, enzymatically inactive and/or conditionally enzymatically inactive endoribonuclease) can target DNA. The site directed polypeptide (e.g., variant, mutated, enzymatically inactive and/or conditionally enzymatically inactive endoribonuclease) can target RNA.

[0158] The site-directed polypeptide can comprise one or more non-native sequences (e.g., the site-directed polypeptide is a fusion protein).

[0159] The site-directed polypeptide can comprise an amino acid sequence comprising at least 15% amino acid identity to a Cas9 from a bacterium (e.g., S. pyogenes), a nucleic acid binding domain, and two nucleic acid cleaving domains (i.e., a HNH domain and a RuvC domain).

[0160] The site-directed polypeptide can comprise an amino acid sequence comprising at least 15% amino acid identity to a Cas9 from a bacterium (e.g., S. pyogenes), and two nucleic acid cleaving domains (i.e., a HNH domain and a RuvC domain).

[0161] The site-directed polypeptide can comprise an amino acid sequence comprising at least 15% amino acid identity to a Cas9 from a bacterium (e.g., S. pyogenes), and two nucleic acid cleaving domains, wherein one or both of the nucleic acid cleaving domains comprise at least 50% amino acid identity to a nuclease domain from Cas9 from a bacterium (e.g., S. pyogenes).

[0162] The site-directed polypeptide can comprise an amino acid sequence comprising at least 15% amino acid identity to a Cas9 from a bacterium (e.g., S. pyogenes), two nucleic acid cleaving domains (i.e., a HNH domain and a RuvC domain), and non-native sequence (for example, a nuclear localization signal) or a linker linking the site-directed polypeptide to a non-native sequence.

[0163] The site-directed polypeptide can comprise an amino acid sequence comprising at least 15% amino acid identity to a Cas9 from a bacterium (e.g., S. pyogenes), two nucleic acid cleaving domains (i.e., a HNH domain and a RuvC domain), wherein the site-directed polypeptide comprises a mutation in one or both of the nucleic acid cleaving domains that reduces the cleaving activity of the nuclease domains by at least 50%.

[0164] The site-directed polypeptide can comprise an amino acid sequence comprising at least 15% amino acid identity to a Cas9 from a bacterium (e.g., S. pyogenes), and two nucleic acid cleaving domains (i.e., a HNH domain and a RuvC domain), wherein one of the nuclease domains comprises a mutation of aspartic acid 10, and/or wherein one of the nuclease domains can comprise a mutation of histidine 840, and wherein the mutation reduces the cleaving activity of the nuclease domain(s) by at least 50%.

[0165] The one or more site-directed polypeptides, e.g. DNA endonucleases, can comprise two nickases that together effect one double-strand break at a specific locus in the genome, or four nickases that together effect or cause two double-strand breaks at specific loci in the genome. Alternatively, one site-directed polypeptide, e.g. DNA endonuclease, can effect or cause one double-strand break at a specific locus in the genome.

### Genome-Targeting Nucleic Acid

[0166] The present disclosure provides a genome-targeting nucleic acid that can direct the activities of an associated polypeptide (e.g., a site-directed polypeptide) to a specific target sequence within a target nucleic acid. The genome-targeting nucleic acid can be an RNA. A genome-targeting RNA is referred to as a “guide RNA” or “gRNA” herein. A guide RNA can comprise at least a spacer sequence that hybridizes to a target nucleic acid sequence of interest, and a CRISPR repeat sequence. In Type II systems, the gRNA also comprises a second RNA called the tracrRNA sequence. In the Type II guide RNA (gRNA), the CRISPR repeat sequence and tracrRNA sequence hybridize to each other to form a duplex. In the Type V guide RNA (gRNA), the crRNA forms a duplex. In both systems, the duplex can bind a site-directed polypeptide, such that the guide RNA and site-direct polypeptide form a complex. The genome-targeting nucleic acid can provide target specificity to the complex by virtue of its association with the site-directed polypeptide. The genome-targeting nucleic acid thus can direct the activity of the site-directed polypeptide.

[0167] Exemplary guide RNAs include the spacer sequences in the Sequence Listing, shown with the genome location of their target sequence, which is within or near the dystrophin gene, and the associated Cas9 cut site, wherein the genome location is based on the GRCh38/hg38 human genome assembly.

[0168] Each guide RNA can be designed to include a spacer sequence complementary to its genomic target sequence, which is within or near the dystrophin gene. For example, each of the spacer sequences in the Sequence Listing can be put into a single strand guide RNA (sgRNA) (e.g., an RNA chimera) or a crRNA (along with a corresponding tracrRNA). See Jinek et al., Science, 337, 816-821 (2012) and Deltcheva et al., Nature, 471, 602-607 (2011).

[0169] The genome-targeting nucleic acid can be a double-molecule guide RNA. The genome-targeting nucleic acid can be a single-molecule guide RNA.

[0170] A double-molecule guide RNA can comprise two strands of RNA. The first strand comprises in the 5′ to 3′ direction, an optional spacer extension sequence, a spacer sequence and a minimum CRISPR repeat sequence. The second strand can comprise a minimum tracrRNA sequence (complementary to the minimum CRISPR repeat sequence), a 3′ tracrRNA sequence and an optional tracrRNA extension sequence.

[0171] A single-molecule guide RNA (sgRNA) in a Type II system can comprise, in the 5′ to 3′ direction, an optional spacer extension sequence, a spacer sequence, a minimum CRISPR repeat sequence, a single-molecule guide linker, a minimum tracrRNA sequence, a 3′ tracrRNA sequence and an optional tracrRNA extension sequence. The optional tracrRNA extension can comprise elements that contribute additional functionality (e.g., stability) to the guide RNA. The single-molecule guide linker can link the minimum CRISPR repeat and the minimum tracrRNA sequence to form a hairpin structure. The optional tracrRNA extension can comprise one or more hairpins.

[0172] A single-molecule guide RNA (sgRNA) in a Type V system can comprise, in the 5′ to 3′ direction, a minimum CRISPR repeat sequence and a spacer sequence.

[0173] By way of illustration, guide RNAs used in the CRISPR/Cas/Cpf1 system, or other smaller RNAs can be readily synthesized by chemical means, as illustrated below and described in the art. While chemical synthetic procedures are continually expanding, purifications of such RNAs by procedures such as high performance liquid chromatography (HPLC, which avoids the use of gels such as PAGE) tends to become more challenging as polynucleotide lengths increase significantly beyond a hundred or so nucleotides. One approach used for generating RNAs of greater length is to produce two or more molecules that are ligated together. Much longer RNAs, such as those encoding a Cas9 of Cpf1 endonuclease, are more readily generated enzymatically. Various types of RNA modifications can be introduced during or after chemical synthesis and/or enzymatic generation of RNAs, e.g., modifications that enhance stability, reduce the likelihood or degree of innate immune response, and/or enhance other attributes, as described in the art.

### Spacer Extension Sequence

[0174] In some examples of genome-targeting nucleic acids, a spacer extension sequence can modify activity, provide stability and/or provide a location for modifications of a genome-targeting nucleic acid. A spacer extension sequence can modify on or off target activity or specificity. In some examples, a spacer extension sequence can be provided. The spacer extension sequence can have a length of more than 1, 5, 10, 15, 20, 25, 30, 35, 40, 45, 50, 60, 70, 80, 90, 100, 120, 140, 160, 180, 200, 220, 240, 260, 280, 300, 320, 340, 360, 380, 400, 1000, 2000, 3000, 4000, 5000, 6000, or 7000 or more nucleotides. The spacer extension sequence can have a length of less than 1, 5, 10, 15, 20, 25, 30, 35, 40, 45, 50, 60, 70, 80, 90, 100, 120, 140, 160, 180, 200, 220, 240, 260, 280, 300, 320, 340, 360, 380, 400, 1000, 2000, 3000, 4000, 5000, 6000, 7000 or more nucleotides. The spacer extension sequence can be less than 10 nucleotides in length. The spacer extension sequence can be between 10-30 nucleotides in length. The spacer extension sequence can be between 30-70 nucleotides in length.

[0175] The spacer extension sequence can comprise another moiety (e.g., a stability control sequence, an endoribonuclease binding sequence, a ribozyme). The moiety can decrease or increase the stability of a nucleic acid targeting nucleic acid. The moiety can be a transcriptional terminator segment (i.e., a transcription termination sequence). The moiety can function in a eukaryotic cell. The moiety can function in a prokaryotic cell. The moiety can function in both eukaryotic and prokaryotic cells. Non-limiting examples of suitable moieties include: a 5′ cap (e.g., a 7-methylguanylate cap (m7 G)), a riboswitch sequence (e.g., to allow for regulated stability and/or regulated accessibility by proteins and protein complexes), a sequence that forms a dsRNA duplex (i.e., a hairpin), a sequence that targets the RNA to a subcellular location (e.g., nucleus, mitochondria, chloroplasts, and the like), a modification or sequence that provides for tracking (e.g., direct conjugation to a fluorescent molecule, conjugation to a moiety that facilitates fluorescent detection, a sequence that allows for fluorescent detection, etc.), and/or a modification or sequence that provides a binding site for proteins (e.g., proteins that act on DNA, including transcriptional activators, transcriptional repressors, DNA methyltransferases, DNA demethylases, histone acetyltransferases, histone deacetylases, and the like).

### Spacer Sequence

[0176] The spacer sequence hybridizes to a sequence in a target nucleic acid of interest. The spacer of a genome-targeting nucleic acid can interact with a target nucleic acid in a sequence-specific manner via hybridization (i.e., base pairing). The nucleotide sequence of the spacer can vary depending on the sequence of the target nucleic acid of interest.

[0177] In a CRISPR/Cas system herein, the spacer sequence can be designed to hybridize to a target nucleic acid that is located 5′ of a PAM of the Cas9 enzyme used in the system. The spacer can perfectly match the target sequence or can have mismatches. Each Cas9 enzyme has a particular PAM sequence that it recognizes in a target DNA. For example, S. pyogenes recognizes in a target nucleic acid a PAM that comprises the sequence 5′-NRG-3′, where R comprises either A or G, where N is any nucleotide and N is immediately 3′ of the target nucleic acid sequence targeted by the spacer sequence.

[0178] The target nucleic acid sequence can comprise 20 nucleotides. The target nucleic acid can comprise less than 20 nucleotides. The target nucleic acid can comprise more than 20 nucleotides. The target nucleic acid can comprise at least: 5, 10, 15, 16, 17, 18, 19, 20, 21, 22, 23, 24, 25, 30 or more nucleotides. In some examples, the target nucleic acid comprises at most: 5, 10, 15, 16, 17, 18, 19, 20, 21, 22, 23, 24, 25, 30 or more nucleotides. The target nucleic acid sequence can comprise 20 bases immediately 5′ of the first nucleotide of the PAM. For example, in a sequence comprising 5′-NNNNNNNNNNNNNNNNNNNNNRG-3′ (SEQ ID NO. 1,410,473) the target nucleic acid can comprise the sequence that corresponds to the Ns, wherein N is any nucleotide, and the underlined NRG sequence is the S. pyogenes PAM.

[0179] The spacer sequence that hybridizes to the target nucleic acid can have a length of at least about 6 nucleotides (nt). The spacer sequence can be at least about 6 nt, at least about 10 nt, at least about 15 nt, at least about 18 nt, at least about 19 nt, at least about 20 nt, at least about 25 nt, at least about 30 nt, at least about 35 nt or at least about 40 nt, from about 6 nt to about 80 nt, from about 6 nt to about 50 nt, from about 6 nt to about 45 nt, from about 6 nt to about 40 nt, from about 6 nt to about 35 nt, from about 6 nt to about 30 nt, from about 6 nt to about 25 nt, from about 6 nt to about 20 nt, from about 6 nt to about 19 nt, from about 10 nt to about 50 nt, from about 10 nt to about 45 nt, from about 10 nt to about 40 nt, from about 10 nt to about 35 nt, from about 10 nt to about 30 nt, from about 10 nt to about 25 nt, from about 10 nt to about 20 nt, from about 10 nt to about 19 nt, from about 19 nt to about 25 nt, from about 19 nt to about 30 nt, from about 19 nt to about 35 nt, from about 19 nt to about 40 nt, from about 19 nt to about 45 nt, from about 19 nt to about 50 nt, from about 19 nt to about 60 nt, from about 20 nt to about 25 nt, from about 20 nt to about 30 nt, from about 20 nt to about 35 nt, from about 20 nt to about 40 nt, from about 20 nt to about 45 nt, from about 20 nt to about 50 nt, or from about 20 nt to about 60 nt. In some examples, the spacer sequence can comprise 20 nucleotides. The spacer sequence can comprise 19 nucleotides.

[0180] In some examples, the percent complementarity between the spacer sequence and the target nucleic acid is at least about 30%, at least about 40%, at least about 50%, at least about 60%, at least about 65%, at least about 70%, at least about 75%, at least about 80%, at least about 85%, at least about 90%, at least about 95%, at least about 97%, at least about 98%, at least about 99%, or 100%. In some examples, the percent complementarity between the spacer sequence and the target nucleic acid is at most about 30%, at most about 40%, at most about 50%, at most about 60%, at most about 65%, at most about 70%, at most about 75%, at most about 80%, at most about 85%, at most about 90%, at most about 95%, at most about 97%, at most about 98%, at most about 99%, or 100%. In some examples, the percent complementarity between the spacer sequence and the target nucleic acid is 100% over the six contiguous 5′-most nucleotides of the target sequence of the complementary strand of the target nucleic acid. The percent complementarity between the spacer sequence and the target nucleic acid can be at least 60% over about 20 contiguous nucleotides. The length of the spacer sequence and the target nucleic acid can differ by 1 to 6 nucleotides, which can be thought of as a bulge or bulges.

[0181] The spacer sequence can be designed or chosen using a computer program. The computer program can use variables, such as predicted melting temperature, secondary structure formation, predicted annealing temperature, sequence identity, genomic context, chromatin accessibility, % GC, frequency of genomic occurrence (e.g., of sequences that are identical or are similar but vary in one or more spots as a result of mismatch, insertion or deletion), methylation status, presence of SNPs, and the like.

### Minimum CRISPR Repeat Sequence

[0182] A minimum CRISPR repeat sequence is a sequence with at least about 30%, about 40%, about 50%, about 60%, about 65%, about 70%, about 75%, about 80%, about 85%, about 90%, about 95%, or 100% sequence identity to a reference CRISPR repeat sequence (e.g., crRNA from S. pyogenes).

[0183] A minimum CRISPR repeat sequence can comprise nucleotides that can hybridize to a minimum tracrRNA sequence in a cell. The minimum CRISPR repeat sequence and a minimum tracrRNA sequence can form a duplex, i.e. a base-paired double-stranded structure. Together, the minimum CRISPR repeat sequence and the minimum tracrRNA sequence can bind to the site-directed polypeptide. At least a part of the minimum CRISPR repeat sequence can hybridize to the minimum tracrRNA sequence. At least a part of the minimum CRISPR repeat sequence can comprise at least about 30%, about 40%, about 50%, about 60%, about 65%, about 70%, about 75%, about 80%, about 85%, about 90%, about 95%, or 100% complementary to the minimum tracrRNA sequence. At least a part of the minimum CRISPR repeat sequence can comprise at most about 30%, about 40%, about 50%, about 60%, about 65%, about 70%, about 75%, about 80%, about 85%, about 90%, about 95%, or 100% complementary to the minimum tracrRNA sequence.

[0184] The minimum CRISPR repeat sequence can have a length from about 7 nucleotides to about 100 nucleotides. For example, the length of the minimum CRISPR repeat sequence is from about 7 nucleotides (nt) to about 50 nt, from about 7 nt to about 40 nt, from about 7 nt to about 30 nt, from about 7 nt to about 25 nt, from about 7 nt to about 20 nt, from about 7 nt to about 15 nt, from about 8 nt to about 40 nt, from about 8 nt to about 30 nt, from about 8 nt to about 25 nt, from about 8 nt to about 20 nt, from about 8 nt to about 15 nt, from about 15 nt to about 100 nt, from about 15 nt to about 80 nt, from about 15 nt to about 50 nt, from about 15 nt to about 40 nt, from about 15 nt to about 30 nt, or from about 15 nt to about 25 nt. In some examples, the minimum CRISPR repeat sequence is approximately 9 nucleotides in length. The minimum CRISPR repeat sequence can be approximately 12 nucleotides in length.

[0185] The minimum CRISPR repeat sequence can be at least about 60% identical to a reference minimum CRISPR repeat sequence (e.g., wild-type crRNA from S. pyogenes) over a stretch of at least 6, 7, or 8 contiguous nucleotides. For example, the minimum CRISPR repeat sequence is at least about 65% identical, at least about 70% identical, at least about 75% identical, at least about 80% identical, at least about 85% identical, at least about 90% identical, at least about 95% identical, at least about 98% identical, at least about 99% identical or 100% identical to a reference minimum CRISPR repeat sequence over a stretch of at least 6, 7, or 8 contiguous nucleotides.

Minimum tracrRNA Sequence

[0186] A minimum tracrRNA sequence can be a sequence with at least about 30%, about 40%, about 50%, about 60%, about 65%, about 70%, about 75%, about 80%, about 85%, about 90%, about 95%, or 100% sequence identity to a reference tracrRNA sequence (e.g., wild type tracrRNA from S. pyogenes).

[0187] A minimum tracrRNA sequence can comprise nucleotides that hybridize to a minimum CRISPR repeat sequence in a cell. A minimum tracrRNA sequence and a minimum CRISPR repeat sequence form a duplex, i.e. a base-paired double-stranded structure. Together, the minimum tracrRNA sequence and the minimum CRISPR repeat bind to a site-directed polypeptide. At least a part of the minimum tracrRNA sequence can hybridize to the minimum CRISPR repeat sequence. The minimum tracrRNA sequence can be at least about 30%, about 40%, about 50%, about 60%, about 65%, about 70%, about 75%, about 80%, about 85%, about 90%, about 95%, or 100% complementary to the minimum CRISPR repeat sequence.

[0188] The minimum tracrRNA sequence can have a length from about 7 nucleotides to about 100 nucleotides. For example, the minimum tracrRNA sequence can be from about 7 nucleotides (nt) to about 50 nt, from about 7 nt to about 40 nt, from about 7 nt to about 30 nt, from about 7 nt to about 25 nt, from about 7 nt to about 20 nt, from about 7 nt to about 15 nt, from about 8 nt to about 40 nt, from about 8 nt to about 30 nt, from about 8 nt to about 25 nt, from about 8 nt to about 20 nt, from about 8 nt to about 15 nt, from about 15 nt to about 100 nt, from about 15 nt to about 80 nt, from about 15 nt to about 50 nt, from about 15 nt to about 40 nt, from about 15 nt to about 30 nt or from about 15 nt to about 25 nt long. The minimum tracrRNA sequence can be approximately 9 nucleotides in length. The minimum tracrRNA sequence can be approximately 12 nucleotides. The minimum tracrRNA can consist of tracrRNA nt 23-48 described in Jinek et al., supra.

[0189] The minimum tracrRNA sequence can be at least about 60% identical to a reference minimum tracrRNA (e.g., wild type, tracrRNA from S. pyogenes) sequence over a stretch of at least 6, 7, or 8 contiguous nucleotides. For example, the minimum tracrRNA sequence can be at least about 65% identical, about 70% identical, about 75% identical, about 80% identical, about 85% identical, about 90% identical, about 95% identical, about 98% identical, about 99% identical or 100% identical to a reference minimum tracrRNA sequence over a stretch of at least 6, 7, or 8 contiguous nucleotides.

[0190] The duplex between the minimum CRISPR RNA and the minimum tracrRNA can comprise a double helix. The duplex between the minimum CRISPR RNA and the minimum tracrRNA can comprise at least about 1, 2, 3, 4, 5, 6, 7, 8, 9, or 10 or more nucleotides. The duplex between the minimum CRISPR RNA and the minimum tracrRNA can comprise at most about 1, 2, 3, 4, 5, 6, 7, 8, 9, or 10 or more nucleotides.

[0191] The duplex can comprise a mismatch (i.e., the two strands of the duplex are not 100% complementary). The duplex can comprise at least about 1, 2, 3, 4, or 5 or mismatches. The duplex can comprise at most about 1, 2, 3, 4, or 5 or mismatches. The duplex can comprise no more than 2 mismatches.

### Bulges

[0192] In some cases, there can be a “bulge” in the duplex between the minimum CRISPR RNA and the minimum tracrRNA. A bulge is an unpaired region of nucleotides within the duplex. A bulge can contribute to the binding of the duplex to the site-directed polypeptide. The bulge can comprise, on one side of the duplex, an unpaired 5′-XXXY-3′ where X is any purine and Y comprises a nucleotide that can form a wobble pair with a nucleotide on the opposite strand, and an unpaired nucleotide region on the other side of the duplex. The number of unpaired nucleotides on the two sides of the duplex can be different.

[0193] In one example, the bulge can comprise an unpaired purine (e.g., adenine) on the minimum CRISPR repeat strand of the bulge. In some examples, the bulge can comprise an unpaired 5′-AAGY-3′ of the minimum tracrRNA sequence strand of the bulge, where Y comprises a nucleotide that can form a wobble pairing with a nucleotide on the minimum CRISPR repeat strand.

[0194] A bulge on the minimum CRISPR repeat side of the duplex can comprise at least 1, 2, 3, 4, or 5 or more unpaired nucleotides. A bulge on the minimum CRISPR repeat side of the duplex can comprise at most 1, 2, 3, 4, or 5 or more unpaired nucleotides. A bulge on the minimum CRISPR repeat side of the duplex can comprise 1 unpaired nucleotide.

[0195] A bulge on the minimum tracrRNA sequence side of the duplex can comprise at least 1, 2, 3, 4, 5, 6, 7, 8, 9, or 10 or more unpaired nucleotides. A bulge on the minimum tracrRNA sequence side of the duplex can comprise at most 1, 2, 3, 4, 5, 6, 7, 8, 9, or 10 or more unpaired nucleotides. A bulge on a second side of the duplex (e.g., the minimum tracrRNA sequence side of the duplex) can comprise 4 unpaired nucleotides.

[0196] A bulge can comprise at least one wobble pairing. In some examples, a bulge comprises at most one wobble pairing. In some examples, a bulge can comprise at least one purine nucleotide. A bulge can comprise at least 3 purine nucleotides. A bulge sequence can comprise at least 5 purine nucleotides. A bulge sequence can comprise at least one guanine nucleotide. A bulge sequence can comprise at least one adenine nucleotide.

### Hairpins

[0197] In various examples, one or more hairpins can be located 3′ to the minimum tracrRNA in the 3′ tracrRNA sequence.

[0198] The hairpin can start at least about 1, 2, 3, 4, 5, 6, 7, 8, 9, 10, 15, or 20 or more nucleotides 3′ from the last paired nucleotide in the minimum CRISPR repeat and minimum tracrRNA sequence duplex. The hairpin can start at most about 1, 2, 3, 4, 5, 6, 7, 8, 9 or 10 or more nucleotides 3′ of the last paired nucleotide in the minimum CRISPR repeat and minimum tracrRNA sequence duplex.

[0199] The hairpin can comprise at least about 1, 2, 3, 4, 5, 6, 7, 8, 9, 10, 15, or 20 or more consecutive nucleotides. The hairpin can comprise at most about 1, 2, 3, 4, 5, 6, 7, 8, 9, 10, 15, or more consecutive nucleotides.

[0200] The hairpin can comprise a CC dinucleotide (i.e., two consecutive cytosine nucleotides).

[0201] The hairpin can comprise duplexed nucleotides (e.g., nucleotides in a hairpin, hybridized together). For example, a hairpin can comprise a CC dinucleotide that is hybridized to a GG dinucleotide in a hairpin duplex of the 3′ tracrRNA sequence.

[0202] One or more of the hairpins can interact with guide RNA-interacting regions of a site-directed polypeptide.

[0203] In some examples, there are two or more hairpins, and in other examples there are three or more hairpins.

3′ tracrRNA Sequence

[0204] A 3′ tracrRNA sequence can comprise a sequence with at least about 30%, about 40%, about 50%, about 60%, about 65%, about 70%, about 75%, about 80%, about 85%, about 90%, about 95%, or 100% sequence identity to a reference tracrRNA sequence (e.g., a tracrRNA from S. pyogenes).

[0205] The 3′ tracrRNA sequence can have a length from about 6 nucleotides to about 100 nucleotides. For example, the 3′ tracrRNA sequence can have a length from about 6 nucleotides (nt) to about 50 nt, from about 6 nt to about 40 nt, from about 6 nt to about 30 nt, from about 6 nt to about 25 nt, from about 6 nt to about 20 nt, from about 6 nt to about 15 nt, from about 8 nt to about 40 nt, from about 8 nt to about 30 nt, from about 8 nt to about 25 nt, from about 8 nt to about 20 nt, from about 8 nt to about 15 nt, from about 15 nt to about 100 nt, from about 15 nt to about 80 nt, from about 15 nt to about 50 nt, from about 15 nt to about 40 nt, from about 15 nt to about 30 nt, or from about 15 nt to about 25 nt. The 3′ tracrRNA sequence can have a length of approximately 14 nucleotides.

[0206] The 3′ tracrRNA sequence can be at least about 60% identical to a reference 3′ tracrRNA sequence (e.g., wild type 3′ tracrRNA sequence from S. pyogenes) over a stretch of at least 6, 7, or 8 contiguous nucleotides. For example, the 3′ tracrRNA sequence can be at least about 60% identical, about 65% identical, about 70% identical, about 75% identical, about 80% identical, about 85% identical, about 90% identical, about 95% identical, about 98% identical, about 99% identical, or 100% identical, to a reference 3′ tracrRNA sequence (e.g., wild type 3′ tracrRNA sequence from S. pyogenes) over a stretch of at least 6, 7, or 8 contiguous nucleotides.

[0207] The 3′ tracrRNA sequence can comprise more than one duplexed region (e.g., hairpin, hybridized region). The 3′ tracrRNA sequence can comprise two duplexed regions.

[0208] The 3′ tracrRNA sequence can comprise a stem loop structure. The stem loop structure in the 3′ tracrRNA can comprise at least 1, 2, 3, 4, 5, 6, 7, 8, 9, 10, 15 or 20 or more nucleotides. The stem loop structure in the 3′ tracrRNA can comprise at most 1, 2, 3, 4, 5, 6, 7, 8, 9 or 10 or more nucleotides. The stem loop structure can comprise a functional moiety. For example, the stem loop structure can comprise an aptamer, a ribozyme, a protein-interacting hairpin, a CRISPR array, an intron, or an exon. The stem loop structure can comprise at least about 1, 2, 3, 4, or 5 or more functional moieties. The stem loop structure can comprise at most about 1, 2, 3, 4, or 5 or more functional moieties.

[0209] The hairpin in the 3′ tracrRNA sequence can comprise a P-domain. In some examples, the P-domain can comprise a double-stranded region in the hairpin.

tracrRNA Extension Sequence

[0210] A tracrRNA extension sequence can be provided whether the tracrRNA is in the context of single-molecule guides or double-molecule guides. The tracrRNA extension sequence can have a length from about 1 nucleotide to about 400 nucleotides. The tracrRNA extension sequence can have a length of more than 1, 5, 10, 15, 20, 25, 30, 35, 40, 45, 50, 60, 70, 80, 90, 100, 120, 140, 160, 180, 200, 220, 240, 260, 280, 300, 320, 340, 360, 380, or 400 nucleotides. The tracrRNA extension sequence can have a length from about 20 to about 5000 or more nucleotides. The tracrRNA extension sequence can have a length of more than 1000 nucleotides. The tracrRNA extension sequence can have a length of less than 1, 5, 10, 15, 20, 25, 30, 35, 40, 45, 50, 60, 70, 80, 90, 100, 120, 140, 160, 180, 200, 220, 240, 260, 280, 300, 320, 340, 360, 380, 400 or more nucleotides. The tracrRNA extension sequence can have a length of less than 1000 nucleotides. The tracrRNA extension sequence can comprise less than 10 nucleotides in length. The tracrRNA extension sequence can be 10-30 nucleotides in length. The tracrRNA extension sequence can be 30-70 nucleotides in length.

[0211] The tracrRNA extension sequence can comprise a functional moiety (e.g., a stability control sequence, ribozyme, endoribonuclease binding sequence). The functional moiety can comprise a transcriptional terminator segment (i.e., a transcription termination sequence). The functional moiety can have a total length from about 10 nucleotides (nt) to about 100 nucleotides, from about 10 nt to about 20 nt, from about 20 nt to about 30 nt, from about 30 nt to about 40 nt, from about 40 nt to about 50 nt, from about 50 nt to about 60 nt, from about 60 nt to about 70 nt, from about 70 nt to about 80 nt, from about 80 nt to about 90 nt, or from about 90 nt to about 100 nt, from about 15 nt to about 80 nt, from about 15 nt to about 50 nt, from about 15 nt to about 40 nt, from about 15 nt to about 30 nt, or from about 15 nt to about 25 nt. The functional moiety can function in a eukaryotic cell. The functional moiety can function in a prokaryotic cell. The functional moiety can function in both eukaryotic and prokaryotic cells.

[0212] Non-limiting examples of suitable tracrRNA extension functional moieties include a 3′ poly-adenylated tail, a riboswitch sequence (e.g., to allow for regulated stability and/or regulated accessibility by proteins and protein complexes), a sequence that forms a dsRNA duplex (i.e., a hairpin), a sequence that targets the RNA to a subcellular location (e.g., nucleus, mitochondria, chloroplasts, and the like), a modification or sequence that provides for tracking (e.g., direct conjugation to a fluorescent molecule, conjugation to a moiety that facilitates fluorescent detection, a sequence that allows for fluorescent detection, etc.), and/or a modification or sequence that provides a binding site for proteins (e.g., proteins that act on DNA, including transcriptional activators, transcriptional repressors, DNA methyltransferases, DNA demethylases, histone acetyltransferases, histone deacetylases, and the like). The tracrRNA extension sequence can comprise a primer binding site or a molecular index (e.g., barcode sequence). The tracrRNA extension sequence can comprise one or more affinity tags.

### Single-Molecule Guide Linker Sequence

[0213] The linker sequence of a single-molecule guide nucleic acid can have a length from about 3 nucleotides to about 100 nucleotides. In Jinek et al., supra, for example, a simple 4 nucleotide “tetraloop” (-GAAA-) was used, Science, 337(6096):816-821 (2012). An illustrative linker has a length from about 3 nucleotides (nt) to about 90 nt, from about 3 nt to about 80 nt, from about 3 nt to about 70 nt, from about 3 nt to about 60 nt, from about 3 nt to about 50 nt, from about 3 nt to about 40 nt, from about 3 nt to about 30 nt, from about 3 nt to about 20 nt, from about 3 nt to about 10 nt. For example, the linker can have a length from about 3 nt to about 5 nt, from about 5 nt to about 10 nt, from about 10 nt to about 15 nt, from about 15 nt to about 20 nt, from about 20 nt to about 25 nt, from about 25 nt to about 30 nt, from about 30 nt to about 35 nt, from about 35 nt to about 40 nt, from about 40 nt to about 50 nt, from about 50 nt to about 60 nt, from about 60 nt to about 70 nt, from about 70 nt to about 80 nt, from about 80 nt to about 90 nt, or from about 90 nt to about 100 nt. The linker of a single-molecule guide nucleic acid can be between 4 and 40 nucleotides. The linker can be at least about 100, 500, 1000, 1500, 2000, 2500, 3000, 3500, 4000, 4500, 5000, 5500, 6000, 6500, or 7000 or more nucleotides. The linker can be at most about 100, 500, 1000, 1500, 2000, 2500, 3000, 3500, 4000, 4500, 5000, 5500, 6000, 6500, or 7000 or more nucleotides.

[0214] Linkers can comprise any of a variety of sequences, although in some examples the linker will not comprise sequences that have extensive regions of homology with other portions of the guide RNA, which might cause intramolecular binding that could interfere with other functional regions of the guide. In Jinek et al., supra, a simple 4 nucleotide sequence -GAAA- was used, Science, 337(6096):816-821 (2012), but numerous other sequences, including longer sequences can likewise be used.

[0215] The linker sequence can comprise a functional moiety. For example, the linker sequence can one or more features, including an aptamer, a ribozyme, a protein-interacting hairpin, a protein binding site, a CRISPR array, an intron, or an exon. The linker sequence can comprise at least about 1, 2, 3, 4, or 5 or more functional moieties. In some examples, the linker sequence can comprise at most about 1, 2, 3, 4, or 5 or more functional moieties.

Genome engineering strategies to correct cells by deletion (excision), insertion, or replacement (deletion and insertion) of one or more exons or aberrant intronic splice acceptor or donor sites

[0216] A step of the ex vivo methods of the present disclosure involves editing/correcting the DMD patient specific iPS cells using genome engineering. Likewise, a step of the in vivo methods of the present disclosure involves editing/correcting the muscle cells in a DMD patient using genome engineering. Similarly, a step in the cellular methods of the present disclosure involves editing/correcting the dystrophin gene in a human cell by genome engineering.

[0217] DMD patients exhibit a wide range of mutations in the dystrophin gene. Therefore, different patients will generally require different correction strategies. Any CRISPR endonuclease can be used in the methods of the present disclosure, each CRISPR endonuclease having its own associated PAM, which may or may not be disease specific. For example, gRNA spacer sequences for targeting the dystrophin gene with a CRISPR/Cas9 endonuclease from S. pyogenes have been identified in SEQ ID NOs: 1-467,030 and 1,410,430-1,410,472 of the Sequence Listing. gRNA spacer sequences for targeting the dystrophin gene with a CRISPR/Cas9 endonuclease from S. aureus have been identified in SEQ ID NOs: 467,031-528,196 of the Sequence Listing. gRNA spacer sequences for targeting the dystrophin gene with a CRISPR/Cas9 endonuclease from S. thermophilus have been identified in SEQ ID NOs: 528,197-553,198 of the Sequence Listing. gRNA spacer sequences for targeting the dystrophin gene with a CRISPR/Cas9 endonuclease from T. denticola have been identified in SEQ ID NOs: 553,199-563,911 of the Sequence Listing. gRNA spacer sequences for targeting the dystrophin gene with a CRISPR/Cas9 endonuclease from N. meningitides have been identified in SEQ ID NOs: 563,912-627,854 and 1,410,400-1,410,402 of the Sequence Listing. gRNA spacer sequences for targeting the dystrophin gene with a CRISPR/Cpf1 endonuclease from Acidominoccoccus, Lachnospiraceae and Franciscella Novicida have been identified in SEQ ID NOs: 627,855-1,410,399 and 1,410,403-1,410,429 of the Sequence Listing.

[0218] One genome engineering strategy involves exon deletion. Targeted deletion of specific exons can be an attractive strategy for treating a large subset of patients with a single therapeutic cocktail. It is predicted that single exon deletions can treat up to 13% of patients, while a multi-exon deletion can treat up to 62% of patients by restoring the dystrophin reading frame. While multi-exon deletions can reach a larger number of patients, for larger deletions the efficiency of deletion greatly decreases with increased size. Therefore, preferred deletions can range from 400 to 350,000 base pairs (bp) in size. For example, deletions can range from 400-1,000; 1,000-5,000; 5,000-10,000, 10,000-25,000; 25,000-50,000, 50,000-100,000; 100,000-200,000; or 200,000-350,000 base pairs in size.

[0219] As stated previously, the DMD gene contains 79 exons. Any one or more of the 79 exons, or aberrant intronic splice acceptor or donor sites, can be deleted in order to restore the dystrophin reading frame. The methods provide gRNA pairs that can be used to delete exons 2, 8, 43, 44, 45, 46, 50, 51, 52, 53, 70, 45-53, or 45-55, as these are the regions that are predicted to reach the largest subset of patients (see Tables 1 and 2; Table 2 percentages given are the average reported from the literature).

[0220] Different regions of the DMD gene can be repaired by either deletion and/or HDR. Certain combinations of gRNAs that cut within the genomic region of interest can be used to correct mutations in the targeted exon. Coordinates are based on the GRch38/hg38 genomic assembly (Table 1).

TABLE 1

| Targeted | | |
|---|---|---|
| Exon(s) | Repair strategy | Genomic Coordinates |
| 45-55 | Deletion and/or HDR | Chrx:31512453-32216916 |
| 45-53 | Deletion and/or HDR | Chrx:31679586-32216916 |
| 2 | Deletion and/or HDR | Chrx:32849820-33211282 |
| 8 | Deletion and/or HDR | Chrx:32697998-32809493 |
| 43 | Deletion and/or HDR | Chrx:32217063-32310082 |
| 44 | Deletion and/or HDR | Chrx:31968514-32287529 |
| 45 | Deletion and/or HDR | Chrx:31932227-32216916 |
| 46 | Deletion and/or HDR | Chrx:31929745-31968339 |
| 50 | Deletion and/or HDR | Chrx:31774192-31836718 |
| 51 | Deletion and/or HDR | Chrx:31729748-31819975 |
| 52 | Deletion and/or HDR | Chrx:31679586-31773960 |
| 53 | Deletion and/or HDR | Chrx:31658144-31729631 |
| 70 | HDR | Chrx:31177970-31180370 |

TABLE 2

| Deleted | % of | |
|---|---|---|
| Exon(s) | Mutations | Citation |
| 45-55 | 62.1 | Beroud, C., et al., Hum Mutat, |
| | | 2007. 28(2): p. 196-202. |
| 45-53 | 53.3 | Tuffery-Giraud, S., et al., |
| | | Hum Mutat, 2009. 30(6): p. 934-45. |
| 2 | 1.9 | Aartsma-Rus, A., et al., Hum Mutat, |
| | | 2009. 30(3): p. 293-9. |
| 8 | 2.2 | Aartsma-Rus, A., et al., Id. |
| | | Bladen, C.L., et al., Hum Mutat, |
| | | 2015. 36(4): p. 395-402. |
| 43 | 5.7 | Aartsma-Rus, A., et al., Id. |
| | | Bladen, C.L., et al., Id. |
| 44 | 6.7 | Aartsma-Rus, A., et al., Id. |
| | | Bladen, C.L., et al., Id. |
| 45 | 8.6 | Aartsma-Rus, A., et al., Id. |
| | | Bladen, C.L., et al., Id. |
| 46 | 4.5 | Aartsma-Rus, A., et al., Id. |
| | | Bladen, C.L., et al., Id. |
| 50 | 3.9 | Aartsma-Rus, A., et al., Id. |
| | | Bladen, C.L., et al., Id. |
| 51 | 13.5 | Aartsma-Rus, A., et al., Id. |
| | | Bladen, C.L., et al., Id. |
| 52 | 3.9 | Aartsma-Rus, A., et al., Id. |
| | | Bladen, C.L., et al., Id. |
| 53 | 8.9 | Aartsma-Rus, A., et al., Id. |
| | | Bladen, C.L., et al., Id. |

[0221] The methods provide gRNA pairs that delete exon 2 by cutting the gene twice, one gRNA cutting at the 5′ end of exon 2 and the other gRNA cutting at the 3′ end of exon 2.

[0222] The methods provide gRNA pairs that delete exon 8 by cutting the gene twice, one gRNA cutting at the 5′ end of exon 8 and the other gRNA cutting at the 3′ end of exon 8.

[0223] The methods provide gRNA pairs that delete exon 43 by cutting the gene twice, one gRNA cutting at the 5′ end of exon 43 and the other gRNA cutting at the 3′ end of exon 43.

[0224] The methods provide gRNA pairs that delete exon 44 by cutting the gene twice, one gRNA cutting at the 5′ end of exon 44 and the other gRNA cutting at the 3′ end of exon 44.

[0225] The methods provide gRNA pairs that delete exon 45 by cutting the gene twice, one gRNA cutting at the 5′ end of exon 45 and the other gRNA cutting at the 3′ end of exon 45.

[0226] The methods provide gRNA pairs that delete exon 46 by cutting the gene twice, one gRNA cutting at the 5′ end of exon 46 and the other gRNA cutting at the 3′ end of exon 46.

[0227] The methods provide gRNA pairs that delete exon 50 by cutting the gene twice, one gRNA cutting at the 5′ end of exon 50 and the other gRNA cutting at the 3′ end of exon 50.

[0228] The methods provide gRNA pairs that delete exon 51 by cutting the gene twice, one gRNA cutting at the 5′ end of exon 51 and the other gRNA cutting at the 3′ end of exon 51.

[0229] The methods provide gRNA pairs that delete exon 52 by cutting the gene twice, one gRNA cutting at the 5′ end of exon 52 and the other gRNA cutting at the 3′ end of exon 52.

[0230] The methods provide gRNA pairs that delete exon 53 by cutting the gene twice, one gRNA cutting at the 5′ end of exon 53 and the other gRNA cutting at the 3′ end of exon 53.

[0231] The methods provide gRNA pairs that delete exon 70 by cutting the gene twice, one gRNA cutting at the 5′ end of exon 70 and the other gRNA cutting at the 3′ end of exon 70.

[0232] The methods provide gRNA pairs that delete exons 45-53 by cutting the gene twice, one gRNA cutting at the 5′ end of exon 45 and the other gRNA cutting at the 3′ end of exon 53.

[0233] The methods provide gRNA pairs that delete exons 45-55 by cutting the gene twice, one gRNA cutting at the 5′ end of exon 45 and the other gRNA cutting at the 3′ end of exon 55.

[0234] Another genome engineering strategy involves insertion or replacement of one or more exons or aberrant intronic splice acceptor or donor sites by homology directed repair (HDR), which is also known as homologous recombination (HR). Homology directed repair is one strategy for treating patients that have premature stop codons due to small insertions/deletions or point mutations. Rather than making a large genomic deletion that will convert a DMD phenotype to a BMD phenotype, this strategy will restore the entire reading frame and completely reverse the diseased state. This strategy will require a more custom approach based on the location of the patient's premature stop. Most of the dystrophin exons are small (<300 bp). This is advantageous, as HDR efficiencies are inversely related to the size of the donor molecule. Also, it is expected that the donor templates can fit into size constrained adeno-associated virus (AAV) molecules, which have been shown to be an effective means of donor template delivery.

[0235] Homology direct repair is a cellular mechanism for repairing double-stranded breaks (DSBs). The most common form is homologous recombination. There are additional pathways for HDR, including single-strand annealing and alternative-HDR. Genome engineering tools allow researchers to manipulate the cellular homologous recombination pathways to create site-specific modifications to the genome. It has been found that cells can repair a double-stranded break using a synthetic donor molecule provided in trans. Therefore, by introducing a double-stranded break near a specific mutation and providing a suitable donor, targeted changes can be made in the genome. Specific cleavage increases the rate of HDR more than 1,000 fold above the rate of 1 in 10⁶ cells receiving a homologous donor alone. The rate of homology directed repair (HDR) at a particular nucleotide is a function of the distance to the cut site, so choosing overlapping or nearest target sites is important. Gene editing offers the advantage over gene addition, as correcting in situ leaves the rest of the genome unperturbed.

[0236] Supplied donors for editing by HDR vary markedly but can contain the intended sequence with small or large flanking homology arms to allow annealing to the genomic DNA. The homology regions flanking the introduced genetic changes can be 30 bp or smaller, or as large as a multi-kilobase cassette that can contain promoters, cDNAs, etc. Both single-stranded and double-stranded oligonucleotide donors have been used. These oligonucleotides can range in size from less than 100 nt to over 200 nt, though longer ssDNA can also be generated and used. Double-stranded donors can be used, including PCR amplicons, plasmids, and mini-circles. In general, it has been found that an AAV vector can be a very effective means of delivery of a donor template, though the packaging limits for individual donors is <5 kb. Active transcription of the donor increased HDR three-fold, indicating the inclusion of promoter can increase conversion. Conversely, CpG methylation of the donor decreased gene expression and HDR.

[0237] In addition to wildtype endonucleases, such as Cas9, nickase variants exist that can have one or the other nuclease domain inactivated resulting in cutting of only one DNA strand. HDR can be directed from individual Cas nickases or using pairs of nickases that flank the target area. Donors can be single-stranded, nicked, or dsDNA.

[0238] The donor DNA can be supplied with the nuclease or independently by a variety of different methods, for example by transfection, nano-particle, micro-injection, or viral transduction. A range of tethering options has been proposed to increase the availability of the donors for HDR. Examples include attaching the donor to the nuclease, attaching to DNA binding proteins that bind nearby, or attaching to proteins that are involved in DNA end binding or repair.

[0239] The repair pathway choice can be guided by a number of culture conditions, such as those that influence cell cycling, or by targeting of DNA repair and associated proteins. For example, to increase HDR, key NHEJ molecules can be suppressed, such as KU70, KU80 or DNA ligase IV.

[0240] Without a donor present, the ends from a DNA break or ends from different breaks can be joined using the several nonhomologous repair pathways in which the DNA ends are joined with little or no base-pairing at the junction. In addition to canonical NHEJ, there are similar repair mechanisms, such as alt-NHEJ. If there are two breaks, the intervening segment can be deleted or inverted. NHEJ repair pathways can lead to insertions, deletions, or mutations at the joints.

[0241] NHEJ was used to insert a 15-kb inducible gene expression cassette into a defined locus in human cell lines after nuclease cleavage. Maresca, M., Lin, V. G., Guo, N. & Yang, Y. Obligate ligation-gated recombination (ObLiGaRe): custom-designed nuclease-mediated targeted integration through nonhomologous end joining. Genome Res 23, 539-546 (2013).

[0242] In addition to genome editing by NHEJ or HDR, site-specific gene insertions have been conducted that use both the NHEJ pathway and HR. A combination approach can be applicable in certain settings, possibly including intron/exon borders. NHEJ can prove effective for ligation in the intron, while the error-free HDR can be better suited in the coding region.

[0243] As stated previously, the DMD gene contains 79 exons. Any one or more of the 79 exons can be repaired in order to correct a mutation and restore the dystrophin reading frame. Some methods provide one gRNA or a pair of gRNAs that can be used to facilitate incorporation of a new sequence from a polynucleotide donor template to insert or replace a sequence in exon 70, as data shows that exon 70 can be prone to the most premature stop codons in the dystrophin gene (Tuffery-Giraud, S., et al., Hum Mutat, 2009. 30(6): p. 934-45) (Flanigan, K. M., et al., Hum Mutat, 2009. 30(12): p. 1657-66). In order to make the method applicable to the largest number of patients, the method involves a donor template that can insert or replace the whole exon 70. Alternatively, the methods provide one gRNA or a pair of gRNAs that can be used to facilitate incorporation of a new sequence from a polynucleotide donor template to insert or replace a sequence in exon 2, exon 8, exon 43, exon 44, exon 45, exon 46, exon 50, exon 51, exon 52, exon 53, or exon 70. See Table 1.

[0244] In order to ensure that the pre-mRNA is properly processed following HDR, it is important to keep the surrounding splicing signals intact. Splicing donor and acceptors can be generally within 100 base pairs of the neighboring intron. Therefore, in some examples, methods can provide all gRNAs that cut approximately +/−0-3100 bp with respect to the exon's intron junctions.

[0245] Some methods provide gRNA pairs that make a deletion by cutting the gene twice, one gRNA cutting at the 5′ end of exon 2 and the other gRNA cutting at the 3′ end of exon 2 that facilitates incorporation of a new sequence from a polynucleotide donor template to replace a sequence in exon 2.

[0246] Alternatively, some methods provide one gRNA from the preceding paragraph to make one double-strand cut that facilitates insertion of a new sequence from a polynucleotide donor template to replace a sequence in exon 2.

[0247] Some examples of the methods provide gRNA pairs that make a deletion by cutting the gene twice, one gRNA cutting at the 5′ end of exon 8 and the other gRNA cutting at the 3′ end of exon 8 that facilitates incorporation of a new sequence from a polynucleotide donor template to replace a sequence in exon 8.

[0248] Alternatively, some methods provide one gRNA from the preceding paragraph to make one double-strand cut that facilitates insertion of a new sequence from a polynucleotide donor template to replace a sequence in exon 8.

[0249] Some methods provide gRNA pairs that make a deletion by cutting the gene twice, one gRNA cutting at the 5′ end of exon 43 and the other gRNA cutting at the 3′ end of exon 43 that facilitates incorporation of a new sequence from a polynucleotide donor template to replace a sequence in exon 43.

[0250] Alternatively, some methods provide one gRNA from the preceding paragraph to make one double-strand cut that facilitates insertion of a new sequence from a polynucleotide donor template to replace a sequence in exon 43.

[0251] Some methods provide gRNA pairs that make a deletion by cutting the gene twice, one gRNA cutting at the 5′ end of exon 44 and the other gRNA cutting at the 3′ end of exon 44 that facilitates incorporation of a new sequence from a polynucleotide donor template to replace a sequence in exon 44.

[0252] Alternatively, some methods provide one gRNA from the preceding paragraph to make one double-strand cut that facilitates insertion of a new sequence from a polynucleotide donor template to replace a sequence in exon 44.

[0253] Some methods provide gRNA pairs that make a deletion by cutting the gene twice, one gRNA cutting at the 5′ end of exon 45 and the other gRNA cutting at the 3′ end of exon 45 that facilitates incorporation of a new sequence from a polynucleotide donor template to replace a sequence in exon 45.

[0254] Alternatively, some methods provide one gRNA from the preceding paragraph to make one double-strand cut that facilitates insertion of a new sequence from a polynucleotide donor template to replace a sequence in exon 45.

[0255] Some methods provide gRNA pairs that make a deletion by cutting the gene twice, one gRNA cutting at the 5′ end of exon 46 and the other gRNA cutting at the 3′ end of exon 46 that facilitates incorporation of a new sequence from a polynucleotide donor template to replace a sequence in exon 46.

[0256] Alternatively, some methods provide one gRNA from the preceding paragraph to make one double-strand cut that facilitates insertion of a new sequence from a polynucleotide donor template to replace a sequence in exon 46.

[0257] Some methods provide gRNA pairs that make a deletion by cutting the gene twice, one gRNA cutting at the 5′ end of exon 50 and the other gRNA cutting at the 3′ end of exon 50 that facilitates incorporation of a new sequence from a polynucleotide donor template to replace a sequence in exon 50.

[0258] Alternatively, some methods provide one gRNA from the preceding paragraph to make one double-strand cut that facilitates insertion of a new sequence from a polynucleotide donor template to replace a sequence in exon 50.

[0259] Some methods provide gRNA pairs that make a deletion by cutting the gene twice, one gRNA cutting at the 5′ end of exon 51 and the other gRNA cutting at the 3′ end of exon 51 that facilitates incorporation of a new sequence from a polynucleotide donor template to replace a sequence in exon 51.

[0260] Alternatively, some methods provide one gRNA from the preceding paragraph to make one double-strand cut that facilitates insertion of a new sequence from a polynucleotide donor template to replace a sequence in exon 51.

[0261] Some methods provide gRNA pairs that make a deletion by cutting the gene twice, one gRNA cutting at the 5′ end of exon 52 and the other gRNA cutting at the 3′ end of exon 52 that facilitates incorporation of a new sequence from a polynucleotide donor template to replace a sequence in exon 52.

[0262] Alternatively, some methods provide one gRNA from the preceding paragraph to make one double-strand cut that facilitates insertion of a new sequence from a polynucleotide donor template to replace a sequence in exon 52.

[0263] Some methods provide gRNA pairs that make a deletion by cutting the gene twice, one gRNA cutting at the 5′ end of exon 53 and the other gRNA cutting at the 3′ end of exon 53 that facilitates incorporation of a new sequence from a polynucleotide donor template to replace a sequence in exon 53.

[0264] Alternatively, some methods provide one gRNA from the preceding paragraph to make one double-strand cut that facilitates insertion of a new sequence from a polynucleotide donor template to replace a sequence in exon 53.

[0265] Some methods provide gRNA pairs that make a deletion by cutting the gene twice, one gRNA cutting at the 5′ end of exon 70 and the other gRNA cutting at the 3′ end of exon 70 that facilitates incorporation of a new sequence from a polynucleotide donor template to replace a sequence in exon 70.

[0266] Alternatively, some methods provide one gRNA from the preceding paragraph to make one double-strand cut that facilitates insertion of a new sequence from a polynucleotide donor template to replace a sequence in exon 70.

[0267] In addition to single exon replacements by homology directed repair, we also describe methods for conducting a partial cDNA knock-in of mutational hotspots found in the DMD gene. For example, a treatment that repairs exons 45-55 can treat up to 62% of patients. Rather than deleting or replacing exons 45-55 as described herein, another treatment option replaces entire genomic region for exons 45-55—which, including introns, spans >350,000 bp—with a cDNA containing only the coding region of exons 45-55, which spans approximate 1800 bp. The replacement could be effected using a homology directed repair approach. By excluding the intergenic regions, the cDNA for exons 45-55 can more easily be accommodated (than the entire genomic region) along with homology arms into any donor vector described in the section of this application titled Nucleic Acids Encoding System Components. In this approach, two gRNAs and Cas9 or Cpf1 that remove the genomic region from exon 45-55 can be delivered along with a donor construct to replace the deleted region with the desired cDNA knock-in.

[0268] The cDNA knock-in approach can be used to replace any series of exons.

[0269] The cDNA knock-in sequence can be optimized to contain synthetic intron sequences. Synthetic introns which are smaller than naturally occurring introns can be added between the exons in the donor construct to ensure proper expression and processing of the DMD locus.

[0270] Illustrative modifications within the dystrophin gene include deletions, insertions, or replacements within or proximal to the dystrophin loci referred to above, such as within the region of less than 3 kb, less than 2 kb, less than 1 kb, less than 0.5 kb upstream or downstream of the specific exon. Given the relatively wide variations of mutations in the dystrophin gene, it will be appreciated that numerous variations of the deletions, insertions, or replacements referenced above (including without limitation larger as well as smaller deletions), would be expected to result in restoration of the dystrophin reading frame and restoration of the dystrophin protein activity.

[0271] Such variants can include deletions, insertions, or replacements that are larger in the 5′ and/or 3′ direction than the specific exon in question, or smaller in either direction. Accordingly, by “near” or “proximal” with respect to specific exon deletions, insertions or replacements, it is intended that the SSB or DSB locus associated with a desired deletion, insertion, or replacement boundary (also referred to herein as an endpoint) can be within a region that is less than about 3 kb from the reference locus noted. The SSB or DSB locus can be more proximal and within 2 kb, within 1 kb, within 0.5 kb, or within 0.1 kb. In the case of small deletions, the desired endpoint can be at or “adjacent to” the reference locus, by which it is intended that the endpoint can be within 100 bp, within 50 bp, within 25 bp, or less than about 10 bp to 5 bp from the reference locus.

[0272] One advantage for patients with DMD of replicating or mimicking the product produced by exon skipping and/or restoring the reading frame is that it is already known to be both safe and associated with the amelioration of DMD. Other examples comprising larger or smaller deletions/insertions/replacements can be expected to provide the same benefit, as long as the dystrophin reading frame is restored. Thus, it can be expected that many variations of the deletions, insertions, and replacements described and illustrated herein can be effective for ameliorating DMD.

### Target Sequence Selection

[0273] Shifts in the location of the 5′ boundary and/or the 3′ boundary relative to particular reference loci can be used to facilitate or enhance particular applications of gene editing, which depend in part on the endonuclease system selected for the editing, as further described and illustrated herein.

[0274] In a first nonlimiting example of such target sequence selection, many endonuclease systems have rules or criteria that can guide the initial selection of potential target sites for cleavage, such as the requirement of a PAM sequence motif in a particular position adjacent to the DNA cleavage sites in the case of CRISPR Type II or Type V endonucleases.

[0275] In another nonlimiting example of target sequence selection or optimization, the frequency of “off-target” activity for a particular combination of target sequence and gene editing endonuclease (i.e. the frequency of DSBs occurring at sites other than the selected target sequence) can be assessed relative to the frequency of on-target activity. In some cases, cells that have been correctly edited at the desired locus can have a selective advantage relative to other cells. Illustrative, but nonlimiting, examples of a selective advantage include the acquisition of attributes such as enhanced rates of replication, persistence, resistance to certain conditions, enhanced rates of successful engraftment or persistence in vivo following introduction into a patient, and other attributes associated with the maintenance or increased numbers or viability of such cells. In other cases, cells that have been correctly edited at the desired locus can be positively selected for by one or more screening methods used to identify, sort or otherwise select for cells that have been correctly edited. Both selective advantage and directed selection methods can take advantage of the phenotype associated with the correction. In some cases, cells can be edited two or more times in order to create a second modification that creates a new phenotype that is used to select or purify the intended population of cells. Such a second modification could be created by adding a second gRNA for a selectable or screenable marker. In some cases, cells can be correctly edited at the desired locus using a DNA fragment that contains the cDNA and also a selectable marker.

[0276] Whether any selective advantage is applicable or any directed selection is to be applied in a particular case, target sequence selection can also be guided by consideration of off-target frequencies in order to enhance the effectiveness of the application and/or reduce the potential for undesired alterations at sites other than the desired target. As described further and illustrated herein and in the art, the occurrence of off-target activity can be influenced by a number of factors including similarities and dissimilarities between the target site and various off target sites, as well as the particular endonuclease used. Bioinformatics tools are available that assist in the prediction of off-target activity, and frequently such tools can also be used to identify the most likely sites of off-target activity, which can then be assessed in experimental settings to evaluate relative frequencies of off-target to on-target activity, thereby allowing the selection of sequences that have higher relative on-target activities. Illustrative examples of such techniques are provided herein, and others are known in the art.

[0277] Another aspect of target sequence selection relates to homologous recombination events. Sequences sharing regions of homology can serve as focal points for homologous recombination events that result in deletion of intervening sequences. Such recombination events occur during the normal course of replication of chromosomes and other DNA sequences, and also at other times when DNA sequences are being synthesized, such as in the case of repairs of double-strand breaks (DSBs), which occur on a regular basis during the normal cell replication cycle but can also be enhanced by the occurrence of various events (such as UV light and other inducers of DNA breakage) or the presence of certain agents (such as various chemical inducers). Many such inducers cause DSBs to occur indiscriminately in the genome, and DSBs can be regularly induced and repaired in normal cells. During repair, the original sequence can be reconstructed with complete fidelity, however, in some cases, small insertions or deletions (referred to as “indels”) are introduced at the DSB site.

[0278] DSBs can also be specifically induced at particular locations, as in the case of the endonucleases systems described herein, which can be used to cause directed or preferential gene modification events at selected chromosomal locations. The tendency for homologous sequences to be subject to recombination in the context of DNA repair (as well as replication) can be taken advantage of in a number of circumstances, and is the basis for one application of gene editing systems, such as CRISPR, in which homology directed repair is used to insert a sequence of interest, provided through use of a “donor” polynucleotide, into a desired chromosomal location.

[0279] Regions of homology between particular sequences, which can be small regions of “microhomology” that can comprise as few as ten basepairs or less, can also be used to bring about desired deletions. For example, a single DSB can be introduced at a site that exhibits microhomology with a nearby sequence. During the normal course of repair of such DSB, a result that occurs with high frequency is the deletion of the intervening sequence as a result of recombination being facilitated by the DSB and concomitant cellular repair process.

[0280] In some circumstances, however, selecting target sequences within regions of homology can also give rise to much larger deletions, including gene fusions (when the deletions are in coding regions), which may or may not be desired given the particular circumstances.

[0281] The examples provided herein further illustrate the selection of various target regions for the creation of DSBs designed to induce disruptions, deletions, or replacements that result in restoration of the dystrophin reading frame, as well as the selection of specific target sequences within such regions that are designed to minimize off-target events relative to on-target events.

### Nucleic Acid Modifications

[0282] In some cases, polynucleotides introduced into cells can comprise one or more modifications that can be used, individually or in combination, for example, to enhance activity, stability or specificity, alter delivery, reduce innate immune responses in host cells, or for other enhancements, as further described herein and known in the art.

[0283] In certain examples, modified polynucleotides can be used in the CRISPR/Cas9/Cpf1 system, in which case the guide RNAs (either single-molecule guides or double-molecule guides) and/or a DNA or an RNA encoding a Cas or Cpf1 endonuclease introduced into a cell can be modified, as described and illustrated below. Such modified polynucleotides can be used in the CRISPR/Cas9/Cpf1 system to edit any one or more genomic loci.

[0284] Using the CRISPR/Cas9/Cpf1 system for purposes of nonlimiting illustrations of such uses, modifications of guide RNAs can be used to enhance the formation or stability of the CRISPR/Cas9/Cpf1 genome editing complex comprising guide RNAs, which can be single-molecule guides or double-molecule, and a Cas or Cpf1 endonuclease. Modifications of guide RNAs can also or alternatively be used to enhance the initiation, stability or kinetics of interactions between the genome editing complex with the target sequence in the genome, which can be used, for example, to enhance on-target activity. Modifications of guide RNAs can also or alternatively be used to enhance specificity, e.g., the relative rates of genome editing at the on-target site as compared to effects at other (off-target) sites.

[0285] Modifications can also or alternatively be used to increase the stability of a guide RNA, e.g., by increasing its resistance to degradation by ribonucleases (RNases) present in a cell, thereby causing its half-life in the cell to be increased. Modifications enhancing guide RNA half-life can be particularly useful in aspects in which a Cas or Cpf1 endonuclease is introduced into the cell to be edited via an RNA that needs to be translated in order to generate endonuclease, because increasing the half-life of guide RNAs introduced at the same time as the RNA encoding the endonuclease can be used to increase the time that the guide RNAs and the encoded Cas or Cpf1 endonuclease co-exist in the cell.

[0286] Modifications can also or alternatively be used to decrease the likelihood or degree to which RNAs introduced into cells elicit innate immune responses. Such responses, which have been well characterized in the context of RNA interference (RNAi), including small-interfering RNAs (siRNAs), as described below and in the art, tend to be associated with reduced half-life of the RNA and/or the elicitation of cytokines or other factors associated with immune responses.

[0287] One or more types of modifications can also be made to RNAs encoding an endonuclease that are introduced into a cell, including, without limitation, modifications that enhance the stability of the RNA (such as by increasing its degradation by RNAses present in the cell), modifications that enhance translation of the resulting product (i.e. the endonuclease), and/or modifications that decrease the likelihood or degree to which the RNAs introduced into cells elicit innate immune responses.

[0288] Combinations of modifications, such as the foregoing and others, can likewise be used. In the case of CRISPR/Cas9/Cpf1, for example, one or more types of modifications can be made to guide RNAs (including those exemplified above), and/or one or more types of modifications can be made to RNAs encoding Cas endonuclease (including those exemplified above).

[0289] By way of illustration, guide RNAs used in the CRISPR/Cas9/Cpf1 system, or other smaller RNAs can be readily synthesized by chemical means, enabling a number of modifications to be readily incorporated, as illustrated below and described in the art. While chemical synthetic procedures are continually expanding, purifications of such RNAs by procedures such as high performance liquid chromatography (HPLC, which avoids the use of gels such as PAGE) tends to become more challenging as polynucleotide lengths increase significantly beyond a hundred or so nucleotides. One approach that can be used for generating chemically-modified RNAs of greater length is to produce two or more molecules that are ligated together. Much longer RNAs, such as those encoding a Cas9 endonuclease, are more readily generated enzymatically. While fewer types of modifications are available for use in enzymatically produced RNAs, there are still modifications that can be used to, e.g., enhance stability, reduce the likelihood or degree of innate immune response, and/or enhance other attributes, as described further below and in the art; and new types of modifications are regularly being developed.

[0290] By way of illustration of various types of modifications, especially those used frequently with smaller chemically synthesized RNAs, modifications can comprise one or more nucleotides modified at the 2′ position of the sugar, in some aspects a 2′-O-alkyl, 2′-O-alkyl-O-alkyl, or 2′-fluoro-modified nucleotide. In some aspects, RNA modifications can comprise 2′-fluoro, 2′-amino or 2′ O-methyl modifications on the ribose of pyrimidines, abasic residues, or an inverted base at the 3′ end of the RNA. Such modifications can be routinely incorporated into oligonucleotides and these oligonucleotides have been shown to have a higher Tm (i.e., higher target binding affinity) than 2′-deoxyoligonucleotides against a given target.

[0291] A number of nucleotide and nucleoside modifications have been shown to make the oligonucleotide into which they are incorporated more resistant to nuclease digestion than the native oligonucleotide; these modified oligos survive intact for a longer time than unmodified oligonucleotides. Specific examples of modified oligonucleotides include those comprising modified backbones, for example, phosphorothioates, phosphotriesters, methyl phosphonates, short chain alkyl or cycloalkyl intersugar linkages or short chain heteroatomic or heterocyclic intersugar linkages. Some oligonucleotides are oligonucleotides with phosphorothioate backbones and those with heteroatom backbones, particularly CH2-NH—O—CH2, CH, ˜N(CH3)˜O˜CH2 (known as a methylene(methylimino) or MMI backbone), CH2-O—N(CH3)-CH2, CH2-N(CH3)-N(CH3)-CH2 and O—N(CH3)-CH2-CH2 backbones, wherein the native phosphodiester backbone is represented as O—P—O—CH,); amide backbones [see De Mesmaeker et al., Ace. Chem. Res., 28:366-374 (1995)]; morpholino backbone structures (see Summerton and Weller, U.S. Pat. No. 5,034,506); peptide nucleic acid (PNA) backbone (wherein the phosphodiester backbone of the oligonucleotide is replaced with a polyamide backbone, the nucleotides being bound directly or indirectly to the aza nitrogen atoms of the polyamide backbone, see Nielsen et al., Science 1991, 254, 1497). Phosphorus-containing linkages include, but are not limited to, phosphorothioates, chiral phosphorothioates, phosphorodithioates, phosphotriesters, aminoalkylphosphotriesters, methyl and other alkyl phosphonates comprising 3′alkylene phosphonates and chiral phosphonates, phosphinates, phosphoramidates comprising 3′-amino phosphoramidate and aminoalkylphosphoramidates, thionophosphoramidates, thionoalkylphosphonates, thionoalkylphosphotriesters, and boranophosphates having normal 3′-5′ linkages, 2′-5′ linked analogs of these, and those having inverted polarity wherein the adjacent pairs of nucleoside units are linked 3′-5′ to 5′-3′ or 2′-5′ to 5′-2′; see U.S. Pat. Nos. 3,687,808; 4,469,863; 4,476,301; 5,023,243; 5,177,196; 5,188,897; 5,264,423; 5,276,019; 5,278,302; 5,286,717; 5,321,131; 5,399,676; 5,405,939; 5,453,496; 5,455,233; 5,466,677; 5,476,925; 5,519,126; 5,536,821; 5,541,306; 5,550,111; 5,563,253; 5,571,799; 5,587,361; and 5,625,050.

[0292] Morpholino-based oligomeric compounds are described in Braasch and David Corey, Biochemistry, 41(14): 4503-4510 (2002); Genesis, Volume 30, Issue 3, (2001); Heasman, Dev. Biol., 243: 209-214 (2002); Nasevicius et al., Nat. Genet., 26:216-220 (2000); Lacerra et al., Proc. Natl. Acad. Sci., 97: 9591-9596 (2000); and U.S. Pat. No. 5,034,506, issued Jul. 23, 1991.

[0293] Cyclohexenyl nucleic acid oligonucleotide mimetics are described in Wang et al., J. Am. Chem. Soc., 122: 8595-8602 (2000).

[0294] Modified oligonucleotide backbones that do not include a phosphorus atom therein have backbones that are formed by short chain alkyl or cycloalkyl internucleoside linkages, mixed heteroatom and alkyl or cycloalkyl internucleoside linkages, or one or more short chain heteroatomic or heterocyclic internucleoside linkages. These comprise those having morpholino linkages (formed in part from the sugar portion of a nucleoside); siloxane backbones; sulfide, sulfoxide and sulfone backbones; formacetyl and thioformacetyl backbones; methylene formacetyl and thioformacetyl backbones; alkene containing backbones; sulfamate backbones; methyleneimino and methylenehydrazino backbones; sulfonate and sulfonamide backbones; amide backbones; and others having mixed N, O, S, and CH2 component parts; see U.S. Pat. Nos. 5,034,506; 5,166,315; 5,185,444; 5,214,134; 5,216,141; 5,235,033; 5,264,562; 5,264,564; 5,405,938; 5,434,257; 5,466,677; 5,470,967; 5,489,677; 5,541,307; 5,561,225; 5,596,086; 5,602,240; 5,610,289; 5,602,240; 5,608,046; 5,610,289; 5,618,704; 5,623,070; 5,663,312; 5,633,360; 5,677,437; and 5,677,439, each of which is herein incorporated by reference.

[0295] One or more substituted sugar moieties can also be included, e.g., one of the following at the 2′ position: OH, SH, SCH3, F, OCN, OCH3 OCH3, OCH3 O(CH2)n CH3, O(CH2)n NH2, or O(CH2)n CH3, where n is from 1 to about 10; C1 to C10 lower alkyl, alkoxyalkoxy, substituted lower alkyl, alkaryl or aralkyl; Cl; Br; CN; CF3; OCF3; O-, S-, or N-alkyl; O-, S-, or N-alkenyl; SOCH3; SO2 CH3; ONO2; NO2; N3; NH2; heterocycloalkyl; heterocycloalkaryl; aminoalkylamino; polyalkylamino; substituted silyl; an RNA cleaving group; a reporter group; an intercalator; a group for improving the pharmacokinetic properties of an oligonucleotide; or a group for improving the pharmacodynamic properties of an oligonucleotide and other substituents having similar properties. In some aspects, a modification includes 2′-methoxyethoxy (2′-O—CH2CH2OCH3, also known as 2′-O-(2-methoxyethyl)) (Martin et al, Helv. Chim. Acta, 1995, 78, 486). Other modifications include 2′-methoxy (2′-O—CH3), 2′-propoxy (2′-OCH2 CH2CH3) and 2′-fluoro (2′-F). Similar modifications can also be made at other positions on the oligonucleotide, particularly the 3′ position of the sugar on the 3′ terminal nucleotide and the 5′ position of 5′ terminal nucleotide. Oligonucleotides can also have sugar mimetics, such as cyclobutyls in place of the pentofuranosyl group.

[0296] In some examples, both a sugar and an internucleoside linkage, i.e., the backbone, of the nucleotide units can be replaced with novel groups. The base units can be maintained for hybridization with an appropriate nucleic acid target compound. One such oligomeric compound, an oligonucleotide mimetic that has been shown to have excellent hybridization properties, is referred to as a peptide nucleic acid (PNA). In PNA compounds, the sugar-backbone of an oligonucleotide can be replaced with an amide containing backbone, for example, an aminoethylglycine backbone. The nucleobases can be retained and bound directly or indirectly to aza nitrogen atoms of the amide portion of the backbone. Representative United States patents that teach the preparation of PNA compounds comprise, but are not limited to, U.S. Pat. Nos. 5,539,082; 5,714,331; and 5,719,262. Further teaching of PNA compounds can be found in Nielsen et al, Science, 254: 1497-1500 (1991).

[0297] Guide RNAs can also include, additionally or alternatively, nucleobase (often referred to in the art simply as “base”) modifications or substitutions. As used herein, “unmodified” or “natural” nucleobases include adenine (A), guanine (G), thymine (T), cytosine (C), and uracil (U). Modified nucleobases include nucleobases found only infrequently or transiently in natural nucleic acids, e.g., hypoxanthine, 6-methyladenine, 5-Me pyrimidines, particularly 5-methylcytosine (also referred to as 5-methyl-2′ deoxycytosine and often referred to in the art as 5-Me-C), 5-hydroxymethylcytosine (HMC), glycosyl HMC and gentobiosyl HMC, as well as synthetic nucleobases, e.g., 2-aminoadenine, 2-(methylamino)adenine, 2-(imidazolylalkyl)adenine, 2-(aminoalklyamino)adenine or other heterosubstituted alkyladenines, 2-thiouracil, 2-thiothymine, 5-bromouracil, 5-hydroxymethyluracil, 8-azaguanine, 7-deazaguanine, N6 (6-aminohexyl)adenine, and 2,6-diaminopurine. Kornberg, A., DNA Replication, W. H. Freeman & Co., San Francisco, pp75-77 (1980); Gebeyehu et al., Nucl. Acids Res. 15:4513 (1997). A “universal” base known in the art, e.g., inosine, can also be included. 5-Me-C substitutions have been shown to increase nucleic acid duplex stability by 0.6-1.2° C. (Sanghvi, Y. S., in Crooke, S. T. and Lebleu, B., eds., Antisense Research and Applications, CRC Press, Boca Raton, 1993, pp. 276-278) and are aspects of base substitutions.

[0298] Modified nucleobases can comprise other synthetic and natural nucleobases, such as 5-methylcytosine (5-me-C), 5-hydroxymethyl cytosine, xanthine, hypoxanthine, 2-aminoadenine, 6-methyl and other alkyl derivatives of adenine and guanine, 2-propyl and other alkyl derivatives of adenine and guanine, 2-thiouracil, 2-thiothymine and 2-thiocytosine, 5-halouracil and cytosine, 5-propynyl uracil and cytosine, 6-azo uracil, cytosine and thymine, 5-uracil (pseudo-uracil), 4-thiouracil, 8-halo, 8-amino, 8-thiol, 8-thioalkyl, 8-hydroxyl and other 8-substituted adenines and guanines, 5-halo particularly 5-bromo, 5-trifluoromethyl and other 5-substituted uracils and cytosines, 7-methylquanine and 7-methyladenine, 8-azaguanine and 8-azaadenine, 7-deazaguanine and 7-deazaadenine, and 3-deazaguanine and 3-deazaadenine.

[0299] Further, nucleobases can comprise those disclosed in U.S. Pat. No. 3,687,808, those disclosed in ‘The Concise Encyclopedia of Polymer Science And Engineering’, pages 858-859, Kroschwitz, J. I., ed. John Wiley & Sons, 1990, those disclosed by Englisch et al., Angewandle Chemie, International Edition’, 1991, 30, page 613, and those disclosed by Sanghvi, Y. S., Chapter 15, Antisense Research and Applications’, pages 289-302, Crooke, S. T. and Lebleu, B. ea., CRC Press, 1993. Certain of these nucleobases are particularly useful for increasing the binding affinity of the oligomeric compounds of the invention. These include 5-substituted pyrimidines, 6-azapyrimidines and N-2, N-6 and 0-6 substituted purines, comprising 2-aminopropyladenine, 5-propynyluracil and 5-propynylcytosine. 5-methylcytosine substitutions have been shown to increase nucleic acid duplex stability by 0.6-1.2° C. (Sanghvi, Y. S., Crooke, S. T. and Lebleu, B., eds, ‘Antisense Research and Applications’, CRC Press, Boca Raton, 1993, pp. 276-278) and are aspects of base substitutions, even more particularly when combined with 2′-O-methoxyethyl sugar modifications. Modified nucleobases are described in U.S. Pat. No. 3,687,808, as well as U.S. Pat. Nos. 4,845,205; 5,130,302; 5,134,066; 5,175,273; 5,367,066; 5,432,272; 5,457,187; 5,459,255; 5,484,908; 5,502,177; 5,525,711; 5,552,540; 5,587,469; 5,596,091; 5,614,617; 5,681,941; 5,750,692; 5,763,588; 5,830,653; 6,005,096; and US Patent Application Publication 2003/0158403.

[0300] Thus, the term “modified” refers to a non-natural sugar, phosphate, or base that is incorporated into a guide RNA, an endonuclease, or both a guide RNA and an endonuclease. It is not necessary for all positions in a given oligonucleotide to be uniformly modified, and in fact more than one of the aforementioned modifications can be incorporated in a single oligonucleotide, or even in a single nucleoside within an oligonucleotide.

[0301] The guide RNAs and/or mRNA (or DNA) encoding an endonuclease can be chemically linked to one or more moieties or conjugates that enhance the activity, cellular distribution, or cellular uptake of the oligonucleotide. Such moieties comprise, but are not limited to, lipid moieties such as a cholesterol moiety [Letsinger et al., Proc. Natl. Acad. Sci. USA, 86: 6553-6556 (1989)]; cholic acid [Manoharan et al., Bioorg. Med. Chem. Let., 4: 1053-1060 (1994)]; a thioether, e.g., hexyl-S-tritylthiol [Manoharan et al, Ann. N. Y. Acad. Sci., 660: 306-309 (1992) and Manoharan et al., Bioorg. Med. Chem. Let., 3: 2765-2770 (1993)]; a thiocholesterol [Oberhauser et al., Nucl. Acids Res., 20: 533-538 (1992)]; an aliphatic chain, e.g., dodecandiol or undecyl residues [Kabanov et al., FEBS Lett., 259: 327-330 (1990) and Svinarchuk et al., Biochimie, 75: 49-54 (1993)]; a phospholipid, e.g., di-hexadecyl-rac-glycerol or triethylammonium 1, 2-di-O-hexadecyl-rac-glycero-3-H-phosphonate [Manoharan et al., Tetrahedron Lett., 36: 3651-3654 (1995) and Shea et al., Nucl. Acids Res., 18: 3777-3783 (1990)]; a polyamine or a polyethylene glycol chain [Mancharan et al., Nucleosides & Nucleotides, 14: 969-973 (1995)]; adamantane acetic acid [Manoharan et al., Tetrahedron Lett., 36: 3651-3654 (1995)]; a palmityl moiety [(Mishra et al., Biochim. Biophys. Acta, 1264: 229-237 (1995)]; or an octadecylamine or hexylamino-carbonyl-t oxycholesterol moiety [Crooke et al., J. Pharmacol. Exp. Ther., 277: 923-937 (1996)]. See also U.S. Pat. Nos. 4,828,979; 4,948,882; 5,218,105; 5,525,465; 5,541,313; 5,545,730; 5,552,538; 5,578,717, 5,580,731; 5,580,731; 5,591,584; 5,109,124; 5,118,802; 5,138,045; 5,414,077; 5,486,603; 5,512,439; 5,578,718; 5,608,046; 4,587,044; 4,605,735; 4,667,025; 4,762,779; 4,789,737; 4,824,941; 4,835,263; 4,876,335; 4,904,582; 4,958,013; 5,082,830; 5,112,963; 5,214,136; 5,082,830; 5,112,963; 5,214,136; 5,245,022; 5,254,469; 5,258,506; 5,262,536; 5,272,250; 5,292,873; 5,317,098; 5,371,241, 5,391,723; 5,416,203, 5,451,463; 5,510,475; 5,512,667; 5,514,785; 5,565,552; 5,567,810; 5,574,142; 5,585,481; 5,587,371; 5,595,726; 5,597,696; 5,599,923; 5,599, 928 and 5,688,941.

[0302] Sugars and other moieties can be used to target proteins and complexes comprising nucleotides, such as cationic polysomes and liposomes, to particular sites. For example, hepatic cell directed transfer can be mediated via asialoglycoprotein receptors (ASGPRs); see, e.g., Hu, et al., Protein Pept Lett. 21(10):1025-30 (2014). Other systems known in the art and regularly developed can be used to target biomolecules of use in the present case and/or complexes thereof to particular target cells of interest.

[0303] These targeting moieties or conjugates can include conjugate groups covalently bound to functional groups, such as primary or secondary hydroxyl groups. Conjugate groups of the invention include intercalators, reporter molecules, polyamines, polyamides, polyethylene glycols, polyethers, groups that enhance the pharmacodynamic properties of oligomers, and groups that enhance the pharmacokinetic properties of oligomers. Typical conjugate groups include cholesterols, lipids, phospholipids, biotin, phenazine, folate, phenanthridine, anthraquinone, acridine, fluoresceins, rhodamines, coumarins, and dyes. Groups that enhance the pharmacodynamic properties, in the context of this disclosure, include groups that improve uptake, enhance resistance to degradation, and/or strengthen sequence-specific hybridization with the target nucleic acid. Groups that enhance the pharmacokinetic properties, in the context of this invention, include groups that improve uptake, distribution, metabolism or excretion of the compounds of the present invention. Representative conjugate groups are disclosed in International Patent Application No. PCT/US92/09196, filed Oct. 23, 1992, and U.S. Pat. No. 6,287,860. Conjugate moieties include, but are not limited to, lipid moieties such as a cholesterol moiety, cholic acid, a thioether, e.g., hexyl-5-tritylthiol, a thiocholesterol, an aliphatic chain, e.g., dodecandiol or undecyl residues, a phospholipid, e.g., di-hexadecyl-rac-glycerol or triethylammonium I,2-di-O-hexadecyl-rac-glycero-3-H-phosphonate, a polyamine or a polyethylene glycol chain, or adamantane acetic acid, a palmityl moiety, or an octadecylamine or hexylamino-carbonyl-oxy cholesterol moiety. See, e.g., U.S. Pat. Nos. 4,828,979; 4,948,882; 5,218,105; 5,525,465; 5,541,313; 5,545,730; 5,552,538; 5,578,717, 5,580,731; 5,580,731; 5,591,584; 5,109,124; 5,118,802; 5,138,045; 5,414,077; 5,486,603; 5,512,439; 5,578,718; 5,608,046; 4,587,044; 4,605,735; 4,667,025; 4,762,779; 4,789,737; 4,824,941; 4,835,263; 4,876,335; 4,904,582; 4,958,013; 5,082,830; 5,112,963; 5,214,136; 5,082,830; 5,112,963; 5,214,136; 5,245,022; 5,254,469; 5,258,506; 5,262,536; 5,272,250; 5,292,873; 5,317,098; 5,371,241, 5,391,723; 5,416,203, 5,451,463; 5,510,475; 5,512,667; 5,514,785; 5,565,552; 5,567,810; 5,574,142; 5,585,481; 5,587,371; 5,595,726; 5,597,696; 5,599,923; 5,599,928 and 5,688,941.

[0304] Longer polynucleotides that are less amenable to chemical synthesis and are typically produced by enzymatic synthesis can also be modified by various means. Such modifications can include, for example, the introduction of certain nucleotide analogs, the incorporation of particular sequences or other moieties at the 5′ or 3′ ends of molecules, and other modifications. By way of illustration, the mRNA encoding Cas9 is approximately 4 kb in length and can be synthesized by in vitro transcription. Modifications to the mRNA can be applied to, e.g., increase its translation or stability (such as by increasing its resistance to degradation with a cell), or to reduce the tendency of the RNA to elicit an innate immune response that is often observed in cells following introduction of exogenous RNAs, particularly longer RNAs such as that encoding Cas9.

[0305] Numerous such modifications have been described in the art, such as polyA tails, 5′ cap analogs (e.g., Anti Reverse Cap Analog (ARCA) or m7G(5′)ppp(5′)G (mCAP)), modified 5′ or 3′ untranslated regions (UTRs), use of modified bases (such as Pseudo-UTP, 2-Thio-UTP, 5-Methylcytidine-5′-Triphosphate (5-Methyl-CTP) or N6-Methyl-ATP), or treatment with phosphatase to remove 5′ terminal phosphates. These and other modifications are known in the art, and new modifications of RNAs are regularly being developed.

[0306] There are numerous commercial suppliers of modified RNAs, including for example, TriLink Biotech, AxoLabs, Bio-Synthesis Inc., Dharmacon and many others. As described by TriLink, for example, 5-Methyl-CTP can be used to impart desirable characteristics, such as increased nuclease stability, increased translation or reduced interaction of innate immune receptors with in vitro transcribed RNA. 5-Methylcytidine-5′-Triphosphate (5-Methyl-CTP), N6-Methyl-ATP, as well as Pseudo-UTP and 2-Thio-UTP, have also been shown to reduce innate immune stimulation in culture and in vivo while enhancing translation, as illustrated in publications by Kormann et al. and Warren et al. referred to below.

[0307] It has been shown that chemically modified mRNA delivered in vivo can be used to achieve improved therapeutic effects; see, e.g., Kormann et al., Nature Biotechnology 29, 154-157 (2011). Such modifications can be used, for example, to increase the stability of the RNA molecule and/or reduce its immunogenicity. Using chemical modifications such as Pseudo-U, N6-Methyl-A, 2-Thio-U and 5-Methyl-C, it was found that substituting just one quarter of the uridine and cytidine residues with 2-Thio-U and 5-Methyl-C respectively resulted in a significant decrease in toll-like receptor (TLR) mediated recognition of the mRNA in mice. By reducing the activation of the innate immune system, these modifications can be used to effectively increase the stability and longevity of the mRNA in vivo; see, e.g., Kormann et al., supra.

[0308] It has also been shown that repeated administration of synthetic messenger RNAs incorporating modifications designed to bypass innate anti-viral responses can reprogram differentiated human cells to pluripotency. See, e.g., Warren, et al., Cell Stem Cell, 7(5):618-30 (2010). Such modified mRNAs that act as primary reprogramming proteins can be an efficient means of reprogramming multiple human cell types. Such cells are referred to as induced pluripotency stem cells (iPSCs), and it was found that enzymatically synthesized RNA incorporating 5-Methyl-CTP, Pseudo-UTP and an Anti Reverse Cap Analog (ARCA) could be used to effectively evade the cell's antiviral response; see, e.g., Warren et al., supra.

[0309] Other modifications of polynucleotides described in the art include, for example, the use of polyA tails, the addition of 5′ cap analogs (such as m7G(5′)ppp(5′)G (mCAP)), modifications of 5′ or 3′ untranslated regions (UTRs), or treatment with phosphatase to remove 5′ terminal phosphates—and new approaches are regularly being developed.

[0310] A number of compositions and techniques applicable to the generation of modified RNAs for use herein have been developed in connection with the modification of RNA interference (RNAi), including small-interfering RNAs (siRNAs). siRNAs present particular challenges in vivo because their effects on gene silencing via mRNA interference are generally transient, which can require repeat administration. In addition, siRNAs are double-stranded RNAs (dsRNA) and mammalian cells have immune responses that have evolved to detect and neutralize dsRNA, which is often a by-product of viral infection. Thus, there are mammalian enzymes such as PKR (dsRNA-responsive kinase), and potentially retinoic acid-inducible gene I (RIG-I), that can mediate cellular responses to dsRNA, as well as Toll-like receptors (such as TLR3, TLR7 and TLR8) that can trigger the induction of cytokines in response to such molecules; see, e.g., the reviews by Angart et al., Pharmaceuticals (Basel) 6(4): 440-468 (2013); Kanasty et al., Molecular Therapy 20(3): 513-524 (2012); Burnett et al., Biotechnol J. 6(9):1130-46 (2011); Judge and MacLachlan, Hum Gene Ther 19(2):111-24 (2008); and references cited therein.

[0311] A large variety of modifications have been developed and applied to enhance RNA stability, reduce innate immune responses, and/or achieve other benefits that can be useful in connection with the introduction of polynucleotides into human cells, as described herein; see, e.g., the reviews by Whitehead K A et al., Annual Review of Chemical and Biomolecular Engineering, 2: 77-96 (2011); Gaglione and Messere, Mini Rev Med Chem, 10(7):578-95 (2010); Chernolovskaya et al, Curr Opin Mol Ther., 12(2):158-67 (2010); Deleavey et al., Curr Protoc Nucleic Acid Chem Chapter 16: Unit 16.3 (2009); Behlke, Oligonucleotides 18(4):305-19 (2008); Fucini et al., Nucleic Acid Ther 22(3): 205-210 (2012); Bremsen et al., Front Genet 3:154 (2012).

[0312] As noted above, there are a number of commercial suppliers of modified RNAs, many of which have specialized in modifications designed to improve the effectiveness of siRNAs. A variety of approaches are offered based on various findings reported in the literature. For example, Dharmacon notes that replacement of a non-bridging oxygen with sulfur (phosphorothioate, PS) has been extensively used to improve nuclease resistance of siRNAs, as reported by Kole, Nature Reviews Drug Discovery 11:125-140 (2012). Modifications of the 2′-position of the ribose have been reported to improve nuclease resistance of the internucleotide phosphate bond while increasing duplex stability (Tm), which has also been shown to provide protection from immune activation. A combination of moderate PS backbone modifications with small, well-tolerated 2′-substitutions (2′-O-Methyl, 2′-Fluoro, 2′-Hydro) have been associated with highly stable siRNAs for applications in vivo, as reported by Soutschek et al. Nature 432:173-178 (2004); and 2′-O-Methyl modifications have been reported to be effective in improving stability as reported by Volkov, Oligonucleotides 19:191-202 (2009). With respect to decreasing the induction of innate immune responses, modifying specific sequences with 2′-O-Methyl, 2′-Fluoro, 2′-Hydro have been reported to reduce TLR7/TLR8 interaction while generally preserving silencing activity; see, e.g., Judge et al., Mol. Ther. 13:494-505 (2006); and Cekaite et al., J. Mol. Biol. 365:90-108 (2007). Additional modifications, such as 2-thiouracil, pseudouracil, 5-methylcytosine, 5-methyluracil, and N6-methyladenosine have also been shown to minimize the immune effects mediated by TLR3, TLR7, and TLR8; see, e.g., Kariko, K. et al., Immunity 23:165-175 (2005).

[0313] As is also known in the art, and commercially available, a number of conjugates can be applied to polynucleotides, such as RNAs, for use herein that can enhance their delivery and/or uptake by cells, including for example, cholesterol, tocopherol and folic acid, lipids, peptides, polymers, linkers and aptamers; see, e.g., the review by Winkler, Ther. Deliv. 4:791-809 (2013), and references cited therein.

### Codon-Optimization

[0314] A polynucleotide encoding a site-directed polypeptide can be codon-optimized according to methods standard in the art for expression in the cell containing the target DNA of interest. For example, if the intended target nucleic acid is in a human cell, a human codon-optimized polynucleotide encoding Cas9 is contemplated for use for producing the Cas9 polypeptide.

### Complexes of a Genome-targeting Nucleic Acid and a Site-Directed Polypeptide

[0315] A genome-targeting nucleic acid interacts with a site-directed polypeptide (e.g., a nucleic acid-guided nuclease such as Cas9), thereby forming a complex. The genome-targeting nucleic acid guides the site-directed polypeptide to a target nucleic acid.

### RNPs

[0316] The site-directed polypeptide and genome-targeting nucleic acid can each be administered separately to a cell or a patient. On the other hand, the site-directed polypeptide can be pre-complexed with one or more guide RNAs, or one or more crRNA together with a tracrRNA. The pre-complexed material can then be administered to a cell or a patient. Such pre-complexed material is known as a ribonucleoprotein particle (RNP).

### Nucleic Acids Encoding System Components

[0317] The present disclosure provides a nucleic acid comprising a nucleotide sequence encoding a genome-targeting nucleic acid of the disclosure, a site-directed polypeptide of the disclosure, and/or any nucleic acid or proteinaceous molecule necessary to carry out the aspects of the methods of the disclosure.

[0318] The nucleic acid encoding a genome-targeting nucleic acid of the disclosure, a site-directed polypeptide of the disclosure, and/or any nucleic acid or proteinaceous molecule necessary to carry out the aspects of the methods of the disclosure can comprise a vector (e.g., a recombinant expression vector).

[0319] The term “vector” refers to a nucleic acid molecule capable of transporting another nucleic acid to which it has been linked. One type of vector is a “plasmid”, which refers to a circular double-stranded DNA loop into which additional nucleic acid segments can be ligated. Another type of vector is a viral vector, wherein additional nucleic acid segments can be ligated into the viral genome. Certain vectors are capable of autonomous replication in a host cell into which they are introduced (e.g., bacterial vectors having a bacterial origin of replication and episomal mammalian vectors). Other vectors (e.g., non-episomal mammalian vectors) are integrated into the genome of a host cell upon introduction into the host cell, and thereby are replicated along with the host genome.

[0320] In some examples, vectors can be capable of directing the expression of nucleic acids to which they are operatively linked. Such vectors are referred to herein as “recombinant expression vectors”, or more simply “expression vectors”, which serve equivalent functions.

[0321] The term “operably linked” means that the nucleotide sequence of interest is linked to regulatory sequence(s) in a manner that allows for expression of the nucleotide sequence. The term “regulatory sequence” is intended to include, for example, promoters, enhancers and other expression control elements (e.g., polyadenylation signals). Such regulatory sequences are well known in the art and are described, for example, in Goeddel; Gene Expression Technology: Methods in Enzymology 185, Academic Press, San Diego, CA (1990). Regulatory sequences include those that direct constitutive expression of a nucleotide sequence in many types of host cells, and those that direct expression of the nucleotide sequence only in certain host cells (e.g., tissue-specific regulatory sequences). It will be appreciated by those skilled in the art that the design of the expression vector can depend on such factors as the choice of the target cell, the level of expression desired, and the like.

[0322] Expression vectors contemplated include, but are not limited to, viral vectors based on vaccinia virus, poliovirus, adenovirus, adeno-associated virus, SV40, herpes simplex virus, human immunodeficiency virus, retrovirus (e.g., Murine Leukemia Virus, spleen necrosis virus, and vectors derived from retroviruses such as Rous Sarcoma Virus, Harvey Sarcoma Virus, avian leukosis virus, a lentivirus, human immunodeficiency virus, myeloproliferative sarcoma virus, and mammary tumor virus) and other recombinant vectors. Other vectors contemplated for eukaryotic target cells include, but are not limited to, the vectors pXT1, pSG5, pSVK3, pBPV, pMSG, and pSVLSV40 (Pharmacia). Additional vectors contemplated for eukaryotic target cells include, but are not limited to, the vectors pCTx-1, pCTx-2, and pCTx-3, which are described in FIGS. 1A to 1C. Other vectors can be used so long as they are compatible with the host cell.

[0323] In some examples, a vector can comprise one or more transcription and/or translation control elements. Depending on the host/vector system utilized, any of a number of suitable transcription and translation control elements, including constitutive and inducible promoters, transcription enhancer elements, transcription terminators, etc. can be used in the expression vector. The vector can be a self-inactivating vector that either inactivates the viral sequences or the components of the CRISPR machinery or other elements.

[0324] Non-limiting examples of suitable eukaryotic promoters (i.e., promoters functional in a eukaryotic cell) include those from cytomegalovirus (CMV) immediate early, herpes simplex virus (HSV) thymidine kinase, early and late SV40, long terminal repeats (LTRs) from retrovirus, human elongation factor-1 promoter (EF1), a hybrid construct comprising the cytomegalovirus (CMV) enhancer fused to the chicken beta-actin promoter (CAG), murine stem cell virus promoter (MSCV), phosphoglycerate kinase-1 locus promoter (PGK), and mouse metallothionein-1.

[0325] For expressing small RNAs, including guide RNAs used in connection with Cas endonuclease, various promoters such as RNA polymerase III promoters, including for example U6 and H1, can be advantageous. Descriptions of and parameters for enhancing the use of such promoters are known in art, and additional information and approaches are regularly being described; see, e.g., Ma, H. et al., Molecular Therapy—Nucleic Acids 3, e161 (2014) doi:10.1038/mtna.2014.12.

[0326] The expression vector can also contain a ribosome binding site for translation initiation and a transcription terminator. The expression vector can also comprise appropriate sequences for amplifying expression. The expression vector can also include nucleotide sequences encoding non-native tags (e.g., histidine tag, hemagglutinin tag, green fluorescent protein, etc.) that are fused to the site-directed polypeptide, thus resulting in a fusion protein.

[0327] A promoter can be an inducible promoter (e.g., a heat shock promoter, tetracycline-regulated promoter, steroid-regulated promoter, metal-regulated promoter, estrogen receptor-regulated promoter, etc.). The promoter can be a constitutive promoter (e.g., CMV promoter, UBC promoter). In some cases, the promoter can be a spatially restricted and/or temporally restricted promoter (e.g., a tissue specific promoter, a cell type specific promoter, etc.).

[0328] The nucleic acid encoding a genome-targeting nucleic acid of the disclosure and/or a site-directed polypeptide can be packaged into or on the surface of delivery vehicles for delivery to cells. Delivery vehicles contemplated include, but are not limited to, nanospheres, liposomes, quantum dots, nanoparticles, polyethylene glycol particles, hydrogels, and micelles. A variety of targeting moieties can be used to enhance the preferential interaction of such vehicles with desired cell types or locations.

[0329] Introduction of the complexes, polypeptides, and nucleic acids of the disclosure into cells can occur by viral or bacteriophage infection, transfection, conjugation, protoplast fusion, lipofection, electroporation, nucleofection, calcium phosphate precipitation, polyethyleneimine (PEI)-mediated transfection, DEAE-dextran mediated transfection, liposome-mediated transfection, particle gun technology, calcium phosphate precipitation, direct micro-injection, nanoparticle-mediated nucleic acid delivery, and the like.

### Delivery

[0330] Guide RNA polynucleotides (RNA or DNA) and/or endonuclease polynucleotide(s) (RNA or DNA) can be delivered by viral or non-viral delivery vehicles known in the art. Alternatively, endonuclease polypeptide(s) can be delivered by non-viral delivery vehicles known in the art, such as electroporation or lipid nanoparticles. In further alternative aspects, the DNA endonuclease can be delivered as one or more polypeptides, either alone or pre-complexed with one or more guide RNAs, or one or more crRNA together with a tracrRNA.

[0331] Polynucleotides can be delivered by non-viral delivery vehicles including, but not limited to, nanoparticles, liposomes, ribonucleoproteins, positively charged peptides, small molecule RNA-conjugates, aptamer-RNA chimeras, and RNA-fusion protein complexes. Some exemplary non-viral delivery vehicles are described in Peer and Lieberman, Gene Therapy, 18: 1127-1133 (2011) (which focuses on non-viral delivery vehicles for siRNA that are also useful for delivery of other polynucleotides).

[0332] Polynucleotides, such as guide RNA, sgRNA, and mRNA encoding an endonuclease, can be delivered to a cell or a patient by a lipid nanoparticle (LNP).

[0333] A LNP refers to any particle having a diameter of less than 1000 nm, 500 nm, 250 nm, 200 nm, 150 nm, 100 nm, 75 nm, 50 nm, or 25 nm. Alternatively, a nanoparticle can range in size from 1-1000 nm, 1-500 nm, 1-250 nm, 25-200 nm, 25-100 nm, 35-75 nm, or 25-60 nm.

[0334] LNPs can be made from cationic, anionic, or neutral lipids. Neutral lipids, such as the fusogenic phospholipid DOPE or the membrane component cholesterol, can be included in LNPs as ‘helper lipids’ to enhance transfection activity and nanoparticle stability. Limitations of cationic lipids include low efficacy owing to poor stability and rapid clearance, as well as the generation of inflammatory or anti-inflammatory responses.

[0335] LNPs can also be comprised of hydrophobic lipids, hydrophilic lipids, or both hydrophobic and hydrophilic lipids.

[0336] Any lipid or combination of lipids that are known in the art can be used to produce a LNP. Examples of lipids used to produce LNPs are: DOTMA, DOSPA, DOTAP, DMRIE, DC-cholesterol, DOTAP-cholesterol, GAP-DMORIE-DPyPE, and GL67A-DOPE-DMPE-polyethylene glycol (PEG). Examples of cationic lipids are: 98N12-5, C12-200, DLin-KC2-DMA (KC2), DLin-MC3-DMA (MC3), XTC, MD1, and 7C1. Examples of neutral lipids are: DPSC, DPPC, POPC, DOPE, and SM. Examples of PEG-modified lipids are: PEG-DMG, PEG-CerC14, and PEG-CerC20.

[0337] The lipids can be combined in any number of molar ratios to produce a LNP. In addition, the polynucleotide(s) can be combined with lipid(s) in a wide range of molar ratios to produce a LNP.

[0338] As stated previously, the site-directed polypeptide and genome-targeting nucleic acid can each be administered separately to a cell or a patient. On the other hand, the site-directed polypeptide can be pre-complexed with one or more guide RNAs, or one or more crRNA together with a tracrRNA. The pre-complexed material can then be administered to a cell or a patient. Such pre-complexed material is known as a ribonucleoprotein particle (RNP).

[0339] RNA is capable of forming specific interactions with RNA or DNA. While this property is exploited in many biological processes, it also comes with the risk of promiscuous interactions in a nucleic acid-rich cellular environment. One solution to this problem is the formation of ribonucleoprotein particles (RNPs), in which the RNA is pre-complexed with an endonuclease. Another benefit of the RNP is protection of the RNA from degradation.

[0340] The endonuclease in the RNP can be modified or unmodified. Likewise, the gRNA, crRNA, tracrRNA, or sgRNA can be modified or unmodified. Numerous modifications are known in the art and can be used.

[0341] The endonuclease and sgRNA can be combined in a 1:1 molar ratio. Alternatively, the endonuclease, crRNA and tracrRNA can be generally combined in a 1:1:1 molar ratio. However, a wide range of molar ratios can be used to produce a RNP.

[0342] A recombinant adeno-associated virus (AAV) vector can be used for delivery. Techniques to produce rAAV particles, in which an AAV genome to be packaged that includes the polynucleotide to be delivered, rep and cap genes, and helper virus functions are provided to a cell are standard in the art. Production of rAAV typically requires that the following components are present within a single cell (denoted herein as a packaging cell): a rAAV genome, AAV rep and cap genes separate from (i.e., not in) the rAAV genome, and helper virus functions. The AAV rep and cap genes can be from any AAV serotype for which recombinant virus can be derived, and can be from a different AAV serotype than the rAAV genome ITRs, including, but not limited to, AAV serotypes AAV-1, AAV-2, AAV-3, AAV-4, AAV-5, AAV-6, AAV-7, AAV-8, AAV-9, AAV-10, AAV-11, AAV-12, AAV-13 and AAV rh.74. Production of pseudotyped rAAV is disclosed in, for example, international patent application publication number WO 01/83692. See Table 3.

TABLE 3

| AAV | Genbank |
|---|---|
| Serotype | Accession No. |
| AAV-1 | NC_002077.1 |
| AAV-2 | NC_001401.2 |
| AAV-3 | NC_001729.1 |
| AAV-3B | AF028705.1 |
| AAV-4 | NC_001829.1 |
| AAV-5 | NC_006152.1 |
| AAV-6 | AF028704.1 |
| AAV-7 | NC_006260.1 |
| AAV-8 | NC_006261.1 |
| AAV-9 | AX753250.1 |
| AAV-10 | AY631965.1 |
| AAV-11 | AY631966.1 |
| AAV-12 | DQ813647.1 |
| AAV-13 | EU285562.1 |

[0343] A method of generating a packaging cell involves creating a cell line that stably expresses all of the necessary components for AAV particle production. For example, a plasmid (or multiple plasmids) comprising a rAAV genome lacking AAV rep and cap genes, AAV rep and cap genes separate from the rAAV genome, and a selectable marker, such as a neomycin resistance gene, are integrated into the genome of a cell. AAV genomes have been introduced into bacterial plasmids by procedures such as GC tailing (Samulski et al., 1982, Proc. Natl. Acad. S6. USA, 79:2077-2081), addition of synthetic linkers containing restriction endonuclease cleavage sites (Laughlin et al., 1983, Gene, 23:65-73) or by direct, blunt-end ligation (Senapathy & Carter, 1984, J. Biol. Chem., 259:4661-4666). The packaging cell line can then be infected with a helper virus, such as adenovirus. The advantages of this method are that the cells are selectable and are suitable for large-scale production of rAAV. Other examples of suitable methods employ adenovirus or baculovirus, rather than plasmids, to introduce rAAV genomes and/or rep and cap genes into packaging cells.

[0344] General principles of rAAV production are reviewed in, for example, Carter, 1992, Current Opinions in Biotechnology, 1533-539; and Muzyczka, 1992, Curr. Topics in Microbial. and Immunol., 158:97-129). Various approaches are described in Ratschin et al., Mol. Cell. Biol. 4:2072 (1984); Hermonat et al., Proc. Natl. Acad. Sci. USA, 81:6466 (1984); Tratschin et al., Mol. Cell. Biol. 5:3251 (1985); McLaughlin et al., J. Virol., 62:1963 (1988); and Lebkowski et al., 1988 Mol. Cell. Biol., 7:349 (1988). Samulski et al. (1989, J. Virol., 63:3822-3828); U.S. Pat. No. 5,173,414; WO 95/13365 and corresponding U.S. Pat. No. 5,658,776; WO 95/13392; WO 96/17947; PCT/US98/18600; WO 97/09441 (PCT/US96/14423); WO 97/08298 (PCT/US96/13872); WO 97/21825 (PCT/US96/20777); WO 97/06243 (PCT/FR96/01064); WO 99/11764; Perrin et al. (1995) Vaccine 13:1244-1250; Paul et al. (1993) Human Gene Therapy 4:609-615; Clark et al. (1996) Gene Therapy 3:1124-1132; U.S. Pat. Nos. 5,786,211; 5,871,982; and 6,258,595.

[0345] AAV vector serotypes can be matched to target cell types. For example, the following exemplary cell types can be transduced by the indicated AAV serotypes among others. See Table 4.

TABLE 4

| Tissue/Cell Type | Serotype |
|---|---|
| Liver | AAV8, AAV3, AAV5, |
| | AAV9 |
| Skeletal muscle | AAV1, AAV7, AAV6, |
| | AAV8, AAV9 |
| Central nervous system | AAV5, AAV1, AAV4 |
| RPE | AAV5, AAV4 |
| Photoreceptor cells | AAV5 |
| Lung | AAV9 |
| Heart | AAV8 |
| Pancreas | AAV8 |
| Kidney | AAV2 |

### Genetically Modified Cells

[0346] The term “genetically modified cell” refers to a cell that comprises at least one genetic modification introduced by genome editing (e.g., using the CRISPR/Cas system). In some ex vivo examples herein, the genetically modified cell can be a genetically modified progenitor cell. In some in vivo examples herein, the genetically modified cell can be a genetically modified muscle cell or genetically modified muscle pre-cursor cell. A genetically modified cell comprising an exogenous genome-targeting nucleic acid and/or an exogenous nucleic acid encoding a genome-targeting nucleic acid is contemplated herein.

[0347] The term “control treated population” describes a population of cells that has been treated with identical media, viral induction, nucleic acid sequences, temperature, confluency, flask size, pH, etc., with the exception of the addition of the genome editing components. Any method known in the art can be used to measure restoration of the dystrophin reading frame, for example, Western Blot analysis of the dystrophin protein or quantifying dystrophin mRNA.

[0348] The term “isolated cell” refers to a cell that has been removed from an organism in which it was originally found, or a descendant of such a cell. Optionally, the cell can be cultured in vitro, e.g., under defined conditions or in the presence of other cells. Optionally, the cell can be later introduced into a second organism or re-introduced into the organism from which it (or the cell from which it is descended) was isolated.

[0349] The term “isolated population” with respect to an isolated population of cells refers to a population of cells that has been removed and separated from a mixed or heterogeneous population of cells. In some cases, the isolated population can be a substantially pure population of cells, as compared to the heterogeneous population from which the cells were isolated or enriched. In some cases, the isolated population can be an isolated population of human progenitor cells, e.g., a substantially pure population of human progenitor cells, as compared to a heterogeneous population of cells comprising human progenitor cells and cells from which the human progenitor cells were derived.

[0350] The term “substantially enhanced,” with respect to a particular cell population, refers to a population of cells in which the occurrence of a particular type of cell is increased relative to pre-existing or reference levels, by at least 2-fold, at least 3-, at least 4-, at least 5-, at least 6-, at least 7-, at least 8-, at least 9, at least 10-, at least 20-, at least 50-, at least 100-, at least 400-, at least 1000-, at least 5000-, at least 20000-, at least 100000- or more fold depending, e.g., on the desired levels of such cells for ameliorating DMD.

[0351] The term “substantially enriched” with respect to a particular cell population, refers to a population of cells that is at least about 10%, about 20%, about 30%, about 40%, about 50%, about 60%, about 70% or more with respect to the cells making up a total cell population.

[0352] The term “substantially pure” with respect to a particular cell population, refers to a population of cells that is at least about 75%, at least about 85%, at least about 90%, or at least about 95% pure, with respect to the cells making up a total cell population. That is, the terms “substantially pure” or “essentially purified,” with regard to a population of progenitor cells, refers to a population of cells that contain fewer than about 20%, about 15%, about 10%, about 9%, about 8%, about 7%, about 6%, about 5%, about 4%, about 3%, about 2%, about 1%, or less than 1%, of cells that are not progenitor cells as defined by the terms herein.

Differentiation of Corrected iPSCs into Pax7+ Muscle Progenitor Cells

[0353] Another step of the ex vivo methods of the present disclosure involves differentiating the corrected iPSCs into Pax7+ muscle progenitor cells. The differentiating step can be performed according to any method known in the art. For example, the differentiating step can comprise contacting the genome-edited iPSC with specific media formulations, including small molecule drugs, to differentiate it into a Pax7+ muscle progenitor cell, as shown in Chal, Oginuma et al. 2015. Alternatively, iPSCs, myogenic progenitors, and cells of other lineages can be differentiated into muscle using any one of a number of established methods that involve transgene over expression, serum withdrawal, and/or small molecule drugs, as shown in the methods of Tapscott, Davis et al. 1988, Langen, Schols et al. 2003, Fujita, Endo et al. 2010, Xu, Tabebordbar et al. 2013, Shoji, Woltjen et al. 2015.

Implanting Pax7+ Muscle Progenitor Cells into Patients

[0354] Another step of the ex vivo methods of the invention involves implanting the Pax7+ muscle progenitor cells into patients. This implanting step can be accomplished using any method of implantation known in the art. For example, the genetically modified cells can be injected directly in the patient's muscle.

### Pharmaceutically Acceptable Carriers

[0355] The ex vivo methods of administering progenitor cells to a subject contemplated herein involve the use of therapeutic compositions comprising progenitor cells.

[0356] Therapeutic compositions can contain a physiologically tolerable carrier together with the cell composition, and optionally at least one additional bioactive agent as described herein, dissolved or dispersed therein as an active ingredient. In some cases, the therapeutic composition is not substantially immunogenic when administered to a mammal or human patient for therapeutic purposes, unless so desired.

[0357] In general, the progenitor cells described herein can be administered as a suspension with a pharmaceutically acceptable carrier. One of skill in the art can recognize that a pharmaceutically acceptable carrier to be used in a cell composition can not include buffers, compounds, cryopreservation agents, preservatives, or other agents in amounts that substantially interfere with the viability of the cells to be delivered to the subject. A formulation comprising cells can include e.g., osmotic buffers that permit cell membrane integrity to be maintained, and optionally, nutrients to maintain cell viability or enhance engraftment upon administration. Such formulations and suspensions are known to those of skill in the art and/or can be adapted for use with the progenitor cells, as described herein, using routine experimentation.

[0358] A cell composition can also be emulsified or presented as a liposome composition, provided that the emulsification procedure does not adversely affect cell viability. The cells and any other active ingredient can be mixed with excipients that are pharmaceutically acceptable and compatible with the active ingredient, and in amounts suitable for use in the therapeutic methods described herein.

[0359] Additional agents included in a cell composition can include pharmaceutically acceptable salts of the components therein. Pharmaceutically acceptable salts include the acid addition salts (formed with the free amino groups of the polypeptide) that are formed with inorganic acids, such as, for example, hydrochloric or phosphoric acids, or such organic acids as acetic, tartaric, mandelic and the like. Salts formed with the free carboxyl groups can also be derived from inorganic bases, such as, for example, sodium, potassium, ammonium, calcium or ferric hydroxides, and such organic bases as isopropylamine, trimethylamine, 2-ethylamino ethanol, histidine, procaine and the like.

[0360] Physiologically tolerable carriers are well known in the art. Exemplary liquid carriers are sterile aqueous solutions that contain no materials in addition to the active ingredients and water, or contain a buffer such as sodium phosphate at physiological pH value, physiological saline or both, such as phosphate-buffered saline. Still further, aqueous carriers can contain more than one buffer salt, as well as salts such as sodium and potassium chlorides, dextrose, polyethylene glycol and other solutes. Liquid compositions can also contain liquid phases in addition to and to the exclusion of water. Exemplary of such additional liquid phases are glycerin, vegetable oils such as cottonseed oil, and water-oil emulsions. The amount of an active compound used in the cell compositions that is effective in the treatment of a particular disorder or condition can depend on the nature of the disorder or condition, and can be determined by standard clinical techniques.

### Administration & Efficacy

[0361] The terms “administering,” “introducing” and “transplanting” are used interchangeably in the context of the placement of cells, e.g., progenitor cells, into a subject, by a method or route that results in at least partial localization of the introduced cells at a desired site, such as a site of injury or repair, such that a desired effect(s) is produced. The cells e.g., progenitor cells, or their differentiated progeny, can be administered by any appropriate route that results in delivery to a desired location in the subject where at least a portion of the implanted cells or components of the cells remain viable. The period of viability of the cells after administration to a subject can be as short as a few hours, e.g., twenty-four hours, to a few days, to as long as several years, or even the life time of the patient, i.e., long-term engraftment. For example, in some aspects described herein, an effective amount of myogenic progenitor cells is administered via a systemic route of administration, such as an intraperitoneal or intravenous route.

[0362] The terms “individual”, “subject,” “host” and “patient” are used interchangeably herein and refer to any subject for whom diagnosis, treatment or therapy is desired. In some aspects, the subject is a mammal. In some aspects, the subject is a human being.

[0363] When provided prophylactically, progenitor cells described herein can be administered to a subject in advance of any symptom of DMD, e.g., prior to the development of muscle wasting. Accordingly, the prophylactic administration of a muscle progenitor cell population can serve to prevent DMD.

[0364] When provided therapeutically, muscle progenitor cells can be provided at (or after) the onset of a symptom or indication of DMD, e.g., upon the onset of muscle wasting.

[0365] The muscle progenitor cell population being administered according to the methods described herein can comprise allogeneic muscle progenitor cells obtained from one or more donors. “Allogeneic” refers to a muscle progenitor cell or biological samples comprising muscle progenitor cells obtained from one or more different donors of the same species, where the genes at one or more loci are not identical. For example, a muscle progenitor cell population being administered to a subject can be derived from one more unrelated donor subjects, or from one or more non-identical siblings. In some cases, syngeneic muscle progenitor cell populations can be used, such as those obtained from genetically identical animals, or from identical twins. The muscle progenitor cells can be autologous cells; that is, the muscle progenitor cells are obtained or isolated from a subject and administered to the same subject, i.e., the donor and recipient are the same.

[0366] The term “effective amount” refers to the amount of a population of progenitor cells or their progeny needed to prevent or alleviate at least one or more signs or symptoms of DMD, and relates to a sufficient amount of a composition to provide the desired effect, e.g., to treat a subject having DMD. The term “therapeutically effective amount” therefore refers to an amount of progenitor cells or a composition comprising progenitor cells that is sufficient to promote a particular effect when administered to a typical subject, such as one who has or is at risk for DMD. An effective amount would also include an amount sufficient to prevent or delay the development of a symptom of the disease, alter the course of a symptom of the disease (for example but not limited to, slow the progression of a symptom of the disease), or reverse a symptom of the disease. It is understood that for any given case, an appropriate “effective amount” can be determined by one of ordinary skill in the art using routine experimentation.

[0367] For use in the various aspects described herein, an effective amount of progenitor cells comprises at least 10² progenitor cells, at least 5×10² progenitor cells, at least 10³ progenitor cells, at least 5×10³ progenitor cells, at least 10⁴ progenitor cells, at least 5×10⁴ progenitor cells, at least 10⁵ progenitor cells, at least 2×10⁵ progenitor cells, at least 3×10⁵ progenitor cells, at least 4×10⁵ progenitor cells, at least 5×10⁵ progenitor cells, at least 6×10⁵ progenitor cells, at least 7×10⁵ progenitor cells, at least 8×10⁵ progenitor cells, at least 9×10⁵ progenitor cells, at least 1×10⁶ progenitor cells, at least 2×10⁶ progenitor cells, at least 3×10⁶ progenitor cells, at least 4×10⁶ progenitor cells, at least 5×10⁶ progenitor cells, at least 6×10⁶ progenitor cells, at least 7×10⁶ progenitor cells, at least 8×10⁶ progenitor cells, at least 9×10⁶ progenitor cells, or multiples thereof. The progenitor cells can be derived from one or more donors, or can be obtained from an autologous source. In some examples described herein, the progenitor cells can be expanded in culture prior to administration to a subject in need thereof.

[0368] Modest and incremental increases in the levels of functional dystrophin expressed in cells of patients having DMD can be beneficial for ameliorating one or more symptoms of the disease, for increasing long-term survival, and/or for reducing side effects associated with other treatments. Upon administration of such cells to human patients, the presence of muscle progenitors that are producing increased levels of functional dystrophin is beneficial. In some cases, effective treatment of a subject gives rise to at least about 3%, 5%, or 7% functional dystrophin relative to total dystrophin in the treated subject. In some examples, functional dystrophin will be at least about 10% of total dystrophin. In some examples, functional dystrophin will be at least about 20% to 30% of total dystrophin. Similarly, the introduction of even relatively limited subpopulations of cells having significantly elevated levels of functional dystrophin can be beneficial in various patients because in some situations normalized cells will have a selective advantage relative to diseased cells. However, even modest levels of muscle progenitors with elevated levels of functional dystrophin can be beneficial for ameliorating one or more aspects of DMD in patients. In some examples, about 10%, about 20%, about 30%, about 40%, about 50%, about 60%, about 70%, about 80%, about 90% or more of the muscle progenitors in patients to whom such cells are administered are producing increased levels of functional dystrophin.

[0369] “Administered” refers to the delivery of a progenitor cell composition into a subject by a method or route that results in at least partial localization of the cell composition at a desired site. A cell composition can be administered by any appropriate route that results in effective treatment in the subject, i.e. administration results in delivery to a desired location in the subject where at least a portion of the composition delivered, i.e. at least 1×10⁴ cells are delivered to the desired site for a period of time. Modes of administration include injection, infusion, instillation, or ingestion. “Injection” includes, without limitation, intravenous, intramuscular, intra-arterial, intrathecal, intraventricular, intracapsular, intraorbital, intracardiac, intradermal, intraperitoneal, transtracheal, subcutaneous, subcuticular, intraarticular, sub capsular, subarachnoid, intraspinal, intracerebro spinal, and intrasternal injection and infusion. In some examples, the route is intravenous. For the delivery of cells, administration by injection or infusion can be made.

[0370] The cells are administered systemically. The phrases “systemic administration,” “administered systemically”, “peripheral administration” and “administered peripherally” refer to the administration of a population of progenitor cells other than directly into a target site, tissue, or organ, such that it enters, instead, the subject's circulatory system and, thus, is subject to metabolism and other like processes.

[0371] The efficacy of a treatment comprising a composition for the treatment of DMD can be determined by the skilled clinician. However, a treatment is considered “effective treatment,” if any one or all of the signs or symptoms of, as but one example, levels of functional dystrophin are altered in a beneficial manner (e.g., increased by at least 10%), or other clinically accepted symptoms or markers of disease are improved or ameliorated. Efficacy can also be measured by failure of an individual to worsen as assessed by hospitalization or need for medical interventions (e.g., reduced muscle wasting, or progression of the disease is halted or at least slowed). Methods of measuring these indicators are known to those of skill in the art and/or described herein. Treatment includes any treatment of a disease in an individual or an animal (some non-limiting examples include a human, or a mammal) and includes: (1) inhibiting the disease, e.g., arresting, or slowing the progression of symptoms; or (2) relieving the disease, e.g., causing regression of symptoms; and (3) preventing or reducing the likelihood of the development of symptoms.

[0372] The treatment according to the present disclosure can ameliorate one or more symptoms associated with DMD by increasing the amount of functional dystrophin in the individual. Early signs typically associated with DMD, include for example, delayed walking, enlarged calf muscle (due to scar tissue), and falling frequently. As the disease progresses, children become wheel chair bound due to muscle wasting and pain. The disease becomes life threatening due to heart and/or respiratory complications.

### Kits

[0373] The present disclosure provides kits for carrying out the methods described herein. A kit can include one or more of a genome-targeting nucleic acid, a polynucleotide encoding a genome-targeting nucleic acid, a site-directed polypeptide, a polynucleotide encoding a site-directed polypeptide, and/or any nucleic acid or proteinaceous molecule necessary to carry out the aspects of the methods described herein, or any combination thereof.

[0374] A kit can comprise: (1) a vector comprising a nucleotide sequence encoding a genome-targeting nucleic acid, and (2) the site directed polypeptide or a vector comprising a nucleotide sequence encoding the site-directed polypeptide, and (3) a reagent for reconstitution and/or dilution of the vector(s) and or polypeptide.

[0375] A kit can comprise: (1) a vector comprising (i) a nucleotide sequence encoding a genome-targeting nucleic acid, and (ii) a nucleotide sequence encoding the site-directed polypeptide and (2) a reagent for reconstitution and/or dilution of the vector.

[0376] In some of the kits, the kit can comprise a single-molecule guide genome-targeting nucleic acid. In any of the above kits, the kit can comprise a double-molecule genome-targeting nucleic acid. In any of the kits, the kit can comprise two or more double-molecule guides or single-molecule guides. The kits can comprise a vector that encodes the nucleic acid targeting nucleic acid.

[0377] In any of the kits, the kit can further comprise a polynucleotide to be inserted to effect the desired genetic modification.

[0378] Components of a kit can be in separate containers, or combined in a single container.

[0379] Any kit can further comprise one or more additional reagents, where such additional reagents are selected from a buffer, a buffer for introducing a polypeptide or polynucleotide into a cell, a wash buffer, a control reagent, a control vector, a control RNA polynucleotide, a reagent for in vitro production of the polypeptide from DNA, adaptors for sequencing and the like. A buffer can be a stabilization buffer, a reconstituting buffer, a diluting buffer, or the like. A kit can also comprise one or more components that can be used to facilitate or enhance the on-target binding or the cleavage of DNA by the endonuclease, or improve the specificity of targeting.

[0380] In addition to the above-mentioned components, a kit can further comprise instructions for using the components of the kit to practice the methods. The instructions for practicing the methods can be recorded on a suitable recording medium. For example, the instructions can be printed on a substrate, such as paper or plastic, etc. The instructions can be present in the kits as a package insert, in the labeling of the container of the kit or components thereof (i.e., associated with the packaging or subpackaging), etc. The instructions can be present as an electronic storage data file present on a suitable computer readable storage medium, e.g. CD-ROM, diskette, flash drive, etc. In some instances, the actual instructions are not present in the kit, but means for obtaining the instructions from a remote source (e.g. via the Internet), can be provided. An example of this case is a kit that comprises a web address where the instructions can be viewed and/or from which the instructions can be downloaded. As with the instructions, this means for obtaining the instructions can be recorded on a suitable substrate.

### Guide RNA Formulation

[0381] Guide RNAs of the present disclosure can be formulated with pharmaceutically acceptable excipients such as carriers, solvents, stabilizers, adjuvants, diluents, etc., depending upon the particular mode of administration and dosage form. Guide RNA compositions can be formulated to achieve a physiologically compatible pH, and range from a pH of about 3 to a pH of about 11, about pH 3 to about pH 7, depending on the formulation and route of administration. In some cases, the pH can be adjusted to a range from about pH 5.0 to about pH 8. In some cases, the compositions can comprise a therapeutically effective amount of at least one compound as described herein, together with one or more pharmaceutically acceptable excipients. Optionally, the compositions can comprise a combination of the compounds described herein, or can include a second active ingredient useful in the treatment or prevention of bacterial growth (for example and without limitation, anti-bacterial or anti-microbial agents), or can include a combination of reagents of the present disclosure.

[0382] Suitable excipients include, for example, carrier molecules that include large, slowly metabolized macromolecules such as proteins, polysaccharides, polylactic acids, polyglycolic acids, polymeric amino acids, amino acid copolymers, and inactive virus particles. Other exemplary excipients can include antioxidants (for example and without limitation, ascorbic acid), chelating agents (for example and without limitation, EDTA), carbohydrates (for example and without limitation, dextrin, hydroxyalkylcellulose, and hydroxyalkylmethylcellulose), stearic acid, liquids (for example and without limitation, oils, water, saline, glycerol and ethanol), wetting or emulsifying agents, pH buffering substances, and the like.

### Other Possible Therapeutic Approaches

[0383] Gene editing can be conducted using nucleases engineered to target specific sequences. To date there are four major types of nucleases: meganucleases and their derivatives, zinc finger nucleases (ZFNs), transcription activator like effector nucleases (TALENs), and CRISPR-Cas9 nuclease systems. The nuclease platforms vary in difficulty of design, targeting density and mode of action, particularly as the specificity of ZFNs and TALENs is through protein-DNA interactions, while RNA-DNA interactions primarily guide Cas9. Cas9 cleavage also requires an adjacent motif, the PAM, which differs between different CRISPR systems. Cas9 from Streptococcus pyogenes cleaves using a NGG PAM, CRISPR from Neisseria meningitidis can cleave at sites with PAMs including NNNNGATT, NNNNNGTTT and NNNNGCTT. A number of other Cas9 orthologs target protospacer adjacent to alternative PAMs.

[0384] CRISPR endonucleases, such as Cas9, can be used in the methods of the present disclosure. However, the teachings described herein, such as therapeutic target sites, could be applied to other forms of endonucleases, such as ZFNs, TALENs, HEs, or MegaTALs, or using combinations of nucleases. However, in order to apply the teachings of the present disclosure to such endonucleases, one would need to, among other things, engineer proteins directed to the specific target sites.

[0385] Additional binding domains can be fused to the Cas9 protein to increase specificity. The target sites of these constructs would map to the identified gRNA specified site, but would require additional binding motifs, such as for a zinc finger domain. In the case of Mega-TAL, a meganuclease can be fused to a TALE DNA-binding domain. The meganuclease domain can increase specificity and provide the cleavage. Similarly, inactivated or dead Cas9 (dCas9) can be fused to a cleavage domain and require the sgRNA/Cas9 target site and adjacent binding site for the fused DNA-binding domain. This likely would require some protein engineering of the dCas9, in addition to the catalytic inactivation, to decrease binding without the additional binding site

### Zinc Finger Nucleases

[0386] Zinc finger nucleases (ZFNs) are modular proteins comprised of an engineered zinc finger DNA binding domain linked to the catalytic domain of the type II endonuclease FokI. Because FokI functions only as a dimer, a pair of ZFNs must be engineered to bind to cognate target “half-site” sequences on opposite DNA strands and with precise spacing between them to enable the catalytically active FokI dimer to form. Upon dimerization of the FokI domain, which itself has no sequence specificity per se, a DNA double-strand break is generated between the ZFN half-sites as the initiating step in genome editing.

[0387] The DNA binding domain of each ZFN is typically comprised of 3-6 zinc fingers of the abundant Cys2-His2 architecture, with each finger primarily recognizing a triplet of nucleotides on one strand of the target DNA sequence, although cross-strand interaction with a fourth nucleotide also can be important. Alteration of the amino acids of a finger in positions that make key contacts with the DNA alters the sequence specificity of a given finger. Thus, a four-finger zinc finger protein will selectively recognize a 12 bp target sequence, where the target sequence is a composite of the triplet preferences contributed by each finger, although triplet preference can be influenced to varying degrees by neighboring fingers. An important aspect of ZFNs is that they can be readily re-targeted to almost any genomic address simply by modifying individual fingers, although considerable expertise is required to do this well. In most applications of ZFNs, proteins of 4-6 fingers are used, recognizing 12-18 bp respectively. Hence, a pair of ZFNs will typically recognize a combined target sequence of 24-36 bp, not including the typical 5-7 bp spacer between half-sites. The binding sites can be separated further with larger spacers, including 15-17 bp. A target sequence of this length is likely to be unique in the human genome, assuming repetitive sequences or gene homologs are excluded during the design process. Nevertheless, the ZFN protein-DNA interactions are not absolute in their specificity so off-target binding and cleavage events do occur, either as a heterodimer between the two ZFNs, or as a homodimer of one or the other of the ZFNs. The latter possibility has been effectively eliminated by engineering the dimerization interface of the FokI domain to create “plus” and “minus” variants, also known as obligate heterodimer variants, which can only dimerize with each other, and not with themselves. Forcing the obligate heterodimer prevents formation of the homodimer. This has greatly enhanced specificity of ZFNs, as well as any other nuclease that adopts these FokI variants.

[0388] A variety of ZFN-based systems have been described in the art, modifications thereof are regularly reported, and numerous references describe rules and parameters that are used to guide the design of ZFNs; see, e.g., Segal et al., Proc Nat/Acad Sci USA 96(6):2758-63 (1999); Dreier B et al., J Mol Biol. 303(4):489-502 (2000); Liu Q et al., J Biol Chem. 277(6):3850-6 (2002); Dreier et al., J Biol Chem 280(42):35588-97 (2005); and Dreier et al., J Biol Chem. 276(31):29466-78 (2001).

### Transcription Activator-Like Effector Nucleases (TALENs)

[0389] TALENs represent another format of modular nucleases whereby, as with ZFNs, an engineered DNA binding domain is linked to the FokI nuclease domain, and a pair of TALENs operate in tandem to achieve targeted DNA cleavage. The major difference from ZFNs is the nature of the DNA binding domain and the associated target DNA sequence recognition properties. The TALEN DNA binding domain derives from TALE proteins, which were originally described in the plant bacterial pathogen Xanthomonas sp. TALEs are comprised of tandem arrays of 33-35 amino acid repeats, with each repeat recognizing a single basepair in the target DNA sequence that is typically up to 20 bp in length, giving a total target sequence length of up to 40 bp. Nucleotide specificity of each repeat is determined by the repeat variable diresidue (RVD), which includes just two amino acids at positions 12 and 13. The bases guanine, adenine, cytosine and thymine are predominantly recognized by the four RVDs: Asn-Asn, Asn-Ile, His-Asp and Asn-Gly, respectively. This constitutes a much simpler recognition code than for zinc fingers, and thus represents an advantage over the latter for nuclease design. Nevertheless, as with ZFNs, the protein-DNA interactions of TALENs are not absolute in their specificity, and TALENs have also benefitted from the use of obligate heterodimer variants of the FokI domain to reduce off-target activity.

[0390] Additional variants of the FokI domain have been created that are deactivated in their catalytic function. If one half of either a TALEN or a ZFN pair contains an inactive FokI domain, then only single-strand DNA cleavage (nicking) will occur at the target site, rather than a DSB. The outcome is comparable to the use of CRISPR/Cas9/Cpf1 “nickase” mutants in which one of the Cas9 cleavage domains has been deactivated. DNA nicks can be used to drive genome editing by HDR, but at lower efficiency than with a DSB. The main benefit is that off-target nicks are quickly and accurately repaired, unlike the DSB, which is prone to NHEJ-mediated mis-repair.

[0391] A variety of TALEN-based systems have been described in the art, and modifications thereof are regularly reported; see, e.g., Boch, Science 326(5959):1509-12 (2009); Mak et al., Science 335(6069):716-9 (2012); and Moscou et al., Science 326(5959):1501 (2009). The use of TALENs based on the “Golden Gate” platform, or cloning scheme, has been described by multiple groups; see, e.g., Cermak et al., Nucleic Acids Res. 39(12):e82 (2011); Li et al., Nucleic Acids Res. 39(14):6315-25(2011); Weber et al., PLoS One. 6(2):e16765 (2011); Wang et al., J Genet Genomics 41(6):339-47, Epub 2014 May 17 (2014); and Cermak T et al., Methods Mol Biol. 1239:133-59 (2015).

### Homing Endonucleases

[0392] Homing endonucleases (HEs) are sequence-specific endonucleases that have long recognition sequences (14-44 base pairs) and cleave DNA with high specificity—often at sites unique in the genome. There are at least six known families of HEs as classified by their structure, including LAGLIDADG (SEQ ID NO. 1,410,474), GIY-YIG, His-Cis box, H-N-H, PD-(D/E)xK, and Vsr-like that are derived from a broad range of hosts, including eukarya, protists, bacteria, archaea, cyanobacteria and phage. As with ZFNs and TALENs, HEs can be used to create a DSB at a target locus as the initial step in genome editing. In addition, some natural and engineered HEs cut only a single strand of DNA, thereby functioning as site-specific nickases. The large target sequence of HEs and the specificity that they offer have made them attractive candidates to create site-specific DSBs.

[0393] A variety of HE-based systems have been described in the art, and modifications thereof are regularly reported; see, e.g., the reviews by Steentoft et al., Glycobiology 24(8):663-80 (2014); Belfort and Bonocora, Methods Mol Biol. 1123:1-26 (2014); Hafez and Hausner, Genome 55(8):553-69 (2012); and references cited therein.

### MegaTAL/Tev-mTALEN/MegaTev

[0394] As further examples of hybrid nucleases, the MegaTAL platform and Tev-mTALEN platform use a fusion of TALE DNA binding domains and catalytically active HEs, taking advantage of both the tunable DNA binding and specificity of the TALE, as well as the cleavage sequence specificity of the HE; see, e.g., Boissel et al., NAR 42: 2591-2601 (2014); Kleinstiver et al., G3 4:1155-65 (2014); and Boissel and Scharenberg, Methods Mol. Biol. 1239: 171-96 (2015).

[0395] In a further variation, the MegaTev architecture is the fusion of a meganuclease (Mega) with the nuclease domain derived from the GIY-YIG homing endonuclease I-Tevl (Tev). The two active sites are positioned ˜30 bp apart on a DNA substrate and generate two DSBs with non-compatible cohesive ends; see, e.g., Wolfs et al., NAR 42, 8816-29 (2014). It is anticipated that other combinations of existing nuclease-based approaches will evolve and be useful in achieving the targeted genome modifications described herein.

dCas9-FokI or dCpf1-Fok1 and Other Nucleases

[0396] Combining the structural and functional properties of the nuclease platforms described above offers a further approach to genome editing that can potentially overcome some of the inherent deficiencies. As an example, the CRISPR genome editing system typically uses a single Cas9 endonuclease to create a DSB. The specificity of targeting is driven by a 20 or 24 nucleotide sequence in the guide RNA that undergoes Watson-Crick base-pairing with the target DNA (plus an additional 2 bases in the adjacent NAG or NGG PAM sequence in the case of Cas9 from S. pyogenes). Such a sequence is long enough to be unique in the human genome, however, the specificity of the RNA/DNA interaction is not absolute, with significant promiscuity sometimes tolerated, particularly in the 5′ half of the target sequence, effectively reducing the number of bases that drive specificity. One solution to this has been to completely deactivate the Cas9 or Cpf1 catalytic function—retaining only the RNA-guided DNA binding function—and instead fusing a FokI domain to the deactivated Cas9; see, e.g., Tsai et al., Nature Biotech 32: 569-76 (2014); and Guilinger et al., Nature Biotech. 32: 577-82 (2014). Because FokI must dimerize to become catalytically active, two guide RNAs are required to tether two FokI fusions in close proximity to form the dimer and cleave DNA. This essentially doubles the number of bases in the combined target sites, thereby increasing the stringency of targeting by CRISPR-based systems.

[0397] As further example, fusion of the TALE DNA binding domain to a catalytically active HE, such as I-Tevl, takes advantage of both the tunable DNA binding and specificity of the TALE, as well as the cleavage sequence specificity of I-Tevl, with the expectation that off-target cleavage can be further reduced.

### Methods and Compositions of the Invention

[0398] Accordingly, the present disclosure relates in particular to the following non-limiting inventions: In a first method, Method 1, the present disclosure provides a method for editing a dystrophin gene in a human cell by genome editing, the method comprising the step of: introducing into the human cell one or more deoxyribonucleic acid (DNA) endonucleases to effect one or more single-strand breaks (SSBs) or double-strand breaks (DSBs) within or near the dystrophin gene that results in a permanent deletion, insertion, or replacement of one or more exons or aberrant intronic splice acceptor or donor sites within or near the dystrophin gene and results in restoration of the dystrophin reading frame and restoration of the dystrophin protein activity.

[0399] In another method, Method 2, the present disclosure provides a method for editing a dystrophin gene in a human cell by genome editing, as provided in Method 1, wherein the human cell is a muscle cell or muscle precursor cell.

[0400] In another method, Method 3, the present disclosure provides an ex vivo method for treating a patient with Duchenne Muscular Dystrophy (DMD), the method comprising the steps of: i) creating a DMD patient specific induced pluripotent stem cell (iPSC); ii) editing within or near a dystrophin gene of the iPSC; iii) differentiating the genome-edited iPSC into a Pax7+ muscle progenitor cell; and iv) implanting the Pax7+ muscle progenitor cell into the patient.

[0401] In another method, Method 4, the present disclosure provides an ex vivo method for treating a patient with DMD, as provided in Method 3, wherein the creating step comprises: a) isolating a somatic cell from the patient; and b) introducing a set of pluripotency-associated genes into the somatic cell to induce the somatic cell to become a pluripotent stem cell.

[0402] In another method, Method 5, the present disclosure provides an ex vivo method for treating a patient with DMD, as provided in Method 4, wherein the somatic cell is a fibroblast.

[0403] In another method, Method 6, the present disclosure provides an ex vivo method for treating a patient with DMD, as provided in Methods 4 and 5, wherein the set of pluripotency-associated genes is one or more of the genes selected from the group consisting of OCT4, SOX2, KLF4, Lin28, NANOG and cMYC.

[0404] In another method, Method 7, the present disclosure provides an ex vivo method for treating a patient with DMD, as provided in any one of Methods 3-6, wherein the editing step comprises introducing into the iPSC one or more deoxyribonucleic acid (DNA) endonucleases to effect one or more single-strand breaks (SSBs) or double-strand breaks (DSBs) within or near the dystrophin gene that results in a permanent deletion, insertion, or replacement of one or more exons or aberrant intronic splice acceptor or donor sites within or near the dystrophin gene and results in restoration of the dystrophin reading frame and restoration of the dystrophin protein activity.

[0405] In another method, Method 8, the present disclosure provides an ex vivo method for treating a patient with DMD, as provided in any one of Methods 3-7, wherein the differentiating step comprises one or more of the following to differentiate the genome-edited iPSC into a Pax7+ muscle progenitor cell: contacting the genome-edited iPSC with specific media formulations, including small molecule drugs; transgene overexpression; or serum withdrawal.

[0406] In another method, Method 9, the present disclosure provides an ex vivo method for treating a patient with DMD, as provided in any one of Methods 3-8, wherein the implanting step comprises implanting the Pax7+ muscle progenitor cell into the patient by local injection into the desired muscle.

[0407] In another method, Method 10, the present disclosure provides an in vivo method for treating a patient with DMD, the method comprising the step of editing a dystrophin gene in a cell of the patient.

[0408] In another method, Method 11, the present disclosure provides an in vivo method for treating a patient with DMD, as provided in Method 10, wherein the editing step comprises introducing into the cell of the patient one or more deoxyribonucleic acid (DNA) endonucleases to effect one or more single-strand breaks (SSBs) or double-strand breaks (DSBs) within or near the dystrophin gene that results in a permanent deletion, insertion, or replacement of one or more exons or aberrant intronic splice acceptor or donor sites within or near the dystrophin gene and results in restoration of the dystrophin reading frame and restoration of the dystrophin protein activity.

[0409] In another method, Method 12, the present disclosure provides an in vivo method for treating a patient with DMD, as provided in Method 11, wherein the cell is a muscle cell or muscle precursor cell.

[0410] In another method, Method 13, the present disclosure provides an in vivo method for treating a patient with DMD, as provided in any one of Methods 1, 7, and 11, wherein the one or more DNA endonucleases is a Cas, Cas1B, Cas2, Cas3, Cas4, Cas5, Cas6, Cas7, Cas8, Cas9 (also known as Csn1 and Csx12), Cas100, Csy1, Csy2, Csy3, Cse1, Cse2, Csc1, Csc2, Csa5, Csn2, Csm2, Csm3, Csm4, Csm5, Csm6, Cmr1, Cmr3, Cmr4, Cmr5, Cmr6, Csb1, Csb2, Csb3, Csx17, Csx14, Csx10, Csx16, CsaX, Csx3, Csx1, Csx15, Csf1, Csf2, Csf3, Csf4, or Cpf1 endonuclease; a homolog thereof, a recombination of the naturally occurring molecule thereof, a codon-optimized thereof, modified version thereof, and combinations thereof.

[0411] In another method, Method 14, the present disclosure provides a method as provided in Method 13, wherein the method comprises introducing into the cell one or more polynucleotides encoding the one or more DNA endonucleases.

[0412] In another method, Method 15, the present disclosure provides a method as provided in Method 13, wherein the method comprises introducing into the cell one or more ribonucleic acids (RNAs) encoding the one or more DNA endonucleases.

[0413] In another method, Method 16, the present disclosure provides a method as provided in Methods 14 and 15, wherein the one or more polynucleotides or one or more RNAs is one or more modified polynucleotides or one or more modified RNAs.

[0414] In another method, Method 17, the present disclosure provides a method as provided in Method 13, wherein the one or more DNA endonuclease is one or more proteins or polypeptides.

[0415] In another method, Method 18, the present disclosure provides a method as provided in any one of Methods 1-17, wherein the method further comprises introducing into the cell one or more guide ribonucleic acids (gRNAs).

[0416] In another method, Method 19, the present disclosure provides a method as provided in Method 18, wherein the one or more gRNAs are single-molecule guide RNA (sgRNAs).

[0417] In another method, Method 20, the present disclosure provides a method as provided in Methods 18 and 19, wherein the one or more gRNAs or one or more sgRNAs is one or more modified gRNAs or one or more modified sgRNAs.

[0418] In another method, Method 21, the present disclosure provides a method as provided in any one of Methods 18-20, wherein the one or more DNA endonucleases is pre-complexed with one or more gRNAs or one or more sgRNAs.

[0419] In another method, Method 22, the present disclosure provides a method as provided in any one of Methods 1-21, wherein the method further comprises introducing into the cell a polynucleotide donor template comprising at least a portion of the wild-type dystrophin gene or cDNA.

[0420] In another method, Method 23, the present disclosure provides a method as provided in Method 22, wherein the at least a portion of the wild-type dystrophin gene or cDNA includes at least a part of exon 1, exon 2, exon 3, exon 4, exon 5, exon 6, exon 7, exon 8, exon 9, exon 10, exon 11, exon 12, exon 13, exon 14, exon 15, exon 16, exon 17, exon 18, exon 19, exon 20, exon 21, exon 22, exon 23, exon 24, exon 25, exon 26, exon 27, exon 28, exon 29, exon 30, exon 31, exon 32, exon 33, exon 34, exon 35, exon 36, exon 37, exon 38, exon 39, exon 40, exon 41, exon 42, exon 43, exon 44, exon 45, exon 46, exon 47, exon 48, exon 49, exon 50, exon 51, exon 52, exon 53, exon 54, exon 55, exon 56, exon 57, exon 58, exon 59, exon 60, exon 61, exon 62, exon 63, exon 64, exon 65, exon 66, exon 67, exon 68, exon 69, exon 70, exon 71, exon 72, exon 73, exon 74, exon 75, exon 76, exon 77, exon 78, exon 79, intronic regions, synthetic intronic regions, fragments, combinations thereof, or the entire dystrophin gene or cDNA.

[0421] In another method, Method 24, the present disclosure provides a method as provided in Method 22, wherein the at least a portion of the wild-type dystrophin gene or cDNA includes exon 1, exon 2, exon 3, exon 4, exon 5, exon 6, exon 7, exon 8, exon 9, exon 10, exon 11, exon 12, exon 13, exon 14, exon 15, exon 16, exon 17, exon 18, exon 19, exon 20, exon 21, exon 22, exon 23, exon 24, exon 25, exon 26, exon 27, exon 28, exon 29, exon 30, exon 31, exon 32, exon 33, exon 34, exon 35, exon 36, exon 37, exon 38, exon 39, exon 40, exon 41, exon 42, exon 43, exon 44, exon 45, exon 46, exon 47, exon 48, exon 49, exon 50, exon 51, exon 52, exon 53, exon 54, exon 55, exon 56, exon 57, exon 58, exon 59, exon 60, exon 61, exon 62, exon 63, exon 64, exon 65, exon 66, exon 67, exon 68, exon 69, exon 70, exon 71, exon 72, exon 73, exon 74, exon 75, exon 76, exon 77, exon 78, exon 79, intronic regions, synthetic intronic regions, fragments, combinations thereof, or the entire dystrophin gene or cDNA.

[0422] In another method, Method 25, the present disclosure provides a method as provided in any one of Methods 22-24, wherein the donor template is a single or double stranded polynucleotide.

[0423] In another method, Method 26, the present disclosure provides a method as provided in any one of Methods 1, 7, and 11, wherein the method further comprises introducing into the cell one or more guide ribonucleic acid (gRNAs), and wherein the one or more DNA endonucleases is one or more Cas9 or Cpf1 endonucleases that effect a pair of single-strand breaks (SSBs) or double-strand breaks (DSBs), the first SSB or DSB break at a 5′ locus and the second SSB or DSB break at a 3′ locus, that results in a permanent deletion or replacement of one or more exons or aberrant intronic splice acceptor or donor sites between the 5′ locus and the 3′ locus within or near the dystrophin gene and results in restoration of the dystrophin reading frame and restoration of the dystrophin protein activity.

[0424] In another method, Method 27, the present disclosure provides a method as provided in Method 26, wherein one gRNA creates a pair of SSBs or DSBs.

[0425] In another method, Method 28, the present disclosure provides a method as provided in Method 26, wherein one gRNA comprises a spacer sequence that is complementary to either the 5′ locus, the 3′ locus, or a segment between the 5′ locus and 3′ locus.

[0426] In another method, Method 29, the present disclosure provides a method as provided in Method 26, wherein the method comprises a first gRNA and a second gRNA, wherein the first gRNA comprises a spacer sequence that is complementary to a segment of the 5′ locus and the second gRNA comprises a spacer sequence that is complementary to a segment of the 3′ locus.

[0427] In another method, Method 30, the present disclosure provides a method as provided in Methods 26-29, wherein the one or more gRNAs are one or more single-molecule guide RNAs (sgRNAs).

[0428] In another method, Method 31, the present disclosure provides a method as provided in Methods 26-30, wherein the one or more gRNAs or one or more sgRNAs are one or more modified gRNAs or one or more modified sgRNAs.

[0429] In another method, Method 32, the present disclosure provides a method as provided in any one of Methods 26-31, wherein the one or more DNA endonucleases is pre-complexed with one or more gRNAs or one or more sgRNAs.

[0430] In another method, Method 33, the present disclosure provides a method as provided in any one of Methods 26-32, wherein there is a deletion of the chromosomal DNA between the 5′ locus and the 3′ locus.

[0431] In another method, Method 34, the present disclosure provides a method as provided in any one of Methods 26-33, wherein the deletion is a single exon deletion.

[0432] In another method, Method 35, the present disclosure provides a method as provided in Method 34, wherein the single exon deletion is a deletion of exon 2, exon 8, exon 43, exon 44, exon 45, exon 46, exon 50, exon 51, exon 52, or exon 53.

[0433] In another method, Method 36, the present disclosure provides a method as provided in Methods 34 or 35, wherein the 5′ locus is proximal to a 5′ boundary of a single exon selected from the group consisting of exon 2, exon 8, exon 43, exon 44, exon 45, exon 46, exon 50, exon 51, exon 52, and exon 53.

[0434] In another method, Method 37, the present disclosure provides a method as provided in any one of Methods 34-36, wherein the 3′ locus is proximal to a 3′ boundary of a single exon selected from the group consisting of exon 2, exon 8, exon 43, exon 44, exon 45, exon 46, exon 50, exon 51, exon 52, and exon 53.

[0435] In another method, Method 38, the present disclosure provides a method as provided in any one of Methods 34-37, wherein the 5′ locus is proximal to a 5′ boundary and the 3′ locus is proximal to the 3′ boundary of a single exon selected from the group consisting of exon 2, exon 8, exon 43, exon 44, exon 45, exon 46, exon 50, exon 51, exon 52, and exon 53.

[0436] In another method, Method 39, the present disclosure provides a method as provided in any one of Methods 36-38, wherein proximal to the boundary of the exon includes the surrounding splice donors and acceptors of the neighboring intron.

[0437] In another method, Method 40, the present disclosure provides a method as provided in any one of Methods 26-33, wherein the deletion is a multi-exon deletion.

[0438] In another method, Method 41, the present disclosure provides a method as provided in Method 40, wherein the multi-exon deletion is a deletion of exons 45-53 or exons 45-55.

[0439] In another method, Method 42, the present disclosure provides a method as provided in any one of Methods 40-41, wherein the 5′ locus is proximal to a 5′ boundary of multiple exons selected from the group consisting of exons 45-53 and exons 45-55.

[0440] In another method, Method 43, the present disclosure provides a method as provided in any one of Methods 40-42, wherein the 3′ locus is proximal to a 3′ boundary of multiple exons selected from the group consisting of exons 45-53 and exons 45-55.

[0441] In another method, Method 44, the present disclosure provides a method as provided in any one of Methods 40-43, wherein the 5′ locus is proximal to a 5′ boundary and a 3′ locus is proximal to the 3′ boundary of multiple exons selected from the group consisting of exons 45-53 and exons 45-55.

[0442] In another method, Method 45, the present disclosure provides a method as provided in any one of Methods 42-44, wherein proximal to the boundary of the exon includes the surrounding splice donors and acceptors of the neighboring intron.

[0443] In another method, Method 46, the present disclosure provides a method as provided in any one of Methods 26-32, wherein there is a replacement of the chromosomal DNA between the 5′ locus and the 3′ locus.

[0444] In another method, Method 47, the present disclosure provides a method as provided in any one of Methods 26-32 and 46, wherein the replacement is a single exon replacement.

[0445] In another method, Method 48, the present disclosure provides a method as provided in any one of Methods 26-32 and 46-47, wherein the single exon replacement is a replacement of exon 2, exon 8, exon 43, exon 44, exon 45, exon 46, exon 50, exon 51, exon 52, exon 53, or exon 70.

[0446] In another method, Method 49, the present disclosure provides a method as provided in any one of Methods 47-48, wherein the 5′ locus is proximal to a 5′ boundary of a single exon selected from the group consisting of exon 2, exon 8, exon 43, exon 44, exon 45, exon 46, exon 50, exon 51, exon 52, exon 53, or exon 70.

[0447] In another method, Method 50, the present disclosure provides a method as provided in any one of Methods 47-49, wherein the 3′ locus is proximal to a 3′ boundary of a single exon selected from the group consisting of exon 2, exon 8, exon 43, exon 44, exon 45, exon 46, exon 50, exon 51, exon 52, exon 53, or exon 70.

[0448] In another method, Method 51, the present disclosure provides a method as provided in any one of Methods 47-50, wherein the 5′ locus is proximal to a 5′ boundary and a 3′ locus is proximal to the 3′ boundary of a single exon selected from the group consisting of exon 2, exon 8, exon 43, exon 44, exon 45, exon 46, exon 50, exon 51, exon 52, exon 53, or exon 70.

[0449] In another method, Method 52, the present disclosure provides a method as provided in any one of Methods 49-51, wherein proximal to the boundary of the exon includes the surrounding splice donors and acceptors of the neighboring intron or neighboring exon.

[0450] In another method, Method 53, the present disclosure provides a method as provided in any one of Methods 26-32 or 46, wherein the replacement is a multi-exon replacement.

[0451] In another method, Method 54, the present disclosure provides a method as provided in any one of Method 53, wherein the multi-exon replacement is a replacement of exons 45-53 or exons 45-55.

[0452] In another method, Method 55, the present disclosure provides a method as provided in any one of Methods 53-54, wherein the 5′ locus is proximal to a 5′ boundary of multiple exons selected from the group consisting of exons 45-53 and exons 45-55.

[0453] In another method, Method 56, the present disclosure provides a method as provided in any one of Methods 53-55, wherein the 3′ locus is proximal to a 3′ boundary of multiple exons selected from the group consisting of exons 45-53 and exons 45-55.

[0454] In another method, Method 57, the present disclosure provides a method as provided in any one of Methods 53-56, wherein the 5′ locus is proximal to a 5′ boundary and a 3′ locus is proximal to the 3′ boundary of multiple exons selected from the group consisting of exons 45-53 and exons 45-55.

[0455] In another method, Method 58, the present disclosure provides a method as provided in any one of Methods 55-57, wherein proximal to the boundary of the exon includes the surrounding splice donors and acceptors of the neighboring intron.

[0456] In another method, Method 59, the present disclosure provides a method as provided in any one of Methods 46-58, wherein the method further comprises introducing into the cell a polynucleotide donor template comprising at least a portion of the wild-type dystrophin gene or cDNA, and the replacement is by homology directed repair (HDR).

[0457] In another method, Method 60, the present disclosure provides a method as provided in any one of Method 59, wherein the at least a portion of the wild-type dystrophin gene or cDNA includes at least a part of exon 1, exon 2, exon 3, exon 4, exon 5, exon 6, exon 7, exon 8, exon 9, exon 10, exon 11, exon 12, exon 13, exon 14, exon 15, exon 16, exon 17, exon 18, exon 19, exon 20, exon 21, exon 22, exon 23, exon 24, exon 25, exon 26, exon 27, exon 28, exon 29, exon 30, exon 31, exon 32, exon 33, exon 34, exon 35, exon 36, exon 37, exon 38, exon 39, exon 40, exon 41, exon 42, exon 43, exon 44, exon 45, exon 46, exon 47, exon 48, exon 49, exon 50, exon 51, exon 52, exon 53, exon 54, exon 55, exon 56, exon 57, exon 58, exon 59, exon 60, exon 61, exon 62, exon 63, exon 64, exon 65, exon 66, exon 67, exon 68, exon 69, exon 70, exon 71, exon 72, exon 73, exon 74, exon 75, exon 76, exon 77, exon 78, exon 79, intronic regions, synthetic intronic regions, fragments, combinations thereof, or the entire dystrophin gene or cDNA.

[0458] In another method, Method 61, the present disclosure provides a method as provided in any one of Method 59, wherein the at least a portion of the wild-type dystrophin gene or cDNA includes exon 1, exon 2, exon 3, exon 4, exon 5, exon 6, exon 7, exon 8, exon 9, exon 10, exon 11, exon 12, exon 13, exon 14, exon 15, exon 16, exon 17, exon 18, exon 19, exon 20, exon 21, exon 22, exon 23, exon 24, exon 25, exon 26, exon 27, exon 28, exon 29, exon 30, exon 31, exon 32, exon 33, exon 34, exon 35, exon 36, exon 37, exon 38, exon 39, exon 40, exon 41, exon 42, exon 43, exon 44, exon 45, exon 46, exon 47, exon 48, exon 49, exon 50, exon 51, exon 52, exon 53, exon 54, exon 55, exon 56, exon 57, exon 58, exon 59, exon 60, exon 61, exon 62, exon 63, exon 64, exon 65, exon 66, exon 67, exon 68, exon 69, exon 70, exon 71, exon 72, exon 73, exon 74, exon 75, exon 76, exon 77, exon 78, exon 79, intronic regions, synthetic intronic regions, fragments, combinations thereof, or the entire dystrophin gene or cDNA.

[0459] In another method, Method 62, the present disclosure provides a method as provided in any one of Methods 1, 7, or 11, wherein the method further comprises introducing into the cell one guide ribonucleic acid (gRNA) and a polynucleotide donor template comprising at least a portion of the wild-type dystrophin gene, and wherein the one or more DNA endonucleases is one or more Cas9 or Cpf1 endonucleases that effect one single-strand break (SSB) or double-strand break (DSB) at a locus within or near the dystrophin gene that facilitates insertion of a new sequence from the polynucleotide donor template into the chromosomal DNA at the locus that results in permanent insertion or correction of one or more exons or aberrant intronic splice acceptor or donor sites within or near the dystrophin gene and results in restoration of the dystrophin reading frame and restoration of the dystrophin protein activity, and wherein the gRNA comprises a spacer sequence that is complementary to a segment of the locus.

[0460] In another method, Method 63, the present disclosure provides a method as provided in any one of Methods 1, 7, or 11, wherein the method further comprises introducing into the cell one or more guide ribonucleic acid (gRNAs) and a polynucleotide donor template comprising at least a portion of the wild-type dystrophin gene, and wherein the one or more DNA endonucleases is one or more Cas9 or Cpf1 endonucleases that effect a pair of single-strand breaks (SSBs) or double-strand breaks (DSBs), the first at a 5′ locus and the second at a 3′ locus, within or near the dystrophin gene that facilitates insertion of a new sequence from the polynucleotide donor template into the chromosomal DNA between the 5′ locus and the 3′ locus that results in a permanent insertion or correction of one or more exons or aberrant intronic splice acceptor or donor sites between the 5′ locus and the 3′ locus within or near the dystrophin gene and results in restoration of the dystrophin reading frame and restoration of the dystrophin protein activity.

[0461] In another method, Method 64, the present disclosure provides a method as provided in Method 63, wherein one gRNA creates a pair of SSBs or DSBs.

[0462] In another method, Method 65, the present disclosure provides a method as provided in Method 63, wherein one gRNA comprises a spacer sequence that is complementary to either the 5′ locus, the 3′ locus, or a segment between the 5′ locus and the 3′ locus.

[0463] In another method, Method 66, the present disclosure provides a method as provided in Method 63, wherein the method comprises a first gRNA and a second gRNA, wherein the first gRNA comprises a spacer sequence that is complementary to a segment of the 5′ locus and the second gRNA comprises a spacer sequence that is complementary to a segment of the 3′ locus.

[0464] In another method, Method 67, the present disclosure provides a method as provided in Methods 62 or 63, wherein the one or more gRNAs are one or more single-molecule guide RNAs (sgRNAs).

[0465] In another method, Method 68, the present disclosure provides a method as provided in Methods 62-63 or 67, wherein the one or more gRNAs or one or more sgRNAs are one or more modified gRNAs or one or more modified sgRNAs.

[0466] In another method, Method 69, the present disclosure provides a method as provided in any one of Methods 62-63 or 67-68, wherein the one or more DNA endonucleases is pre-complexed with one or more gRNAs or one or more sgRNAs.

[0467] In another method, Method 70, the present disclosure provides a method as provided in any one of Methods 62-69, wherein the insertion is a single exon insertion

[0468] In another method, Method 71, the present disclosure provides a method as provided in Method 70, wherein the single exon insertion is an insertion of exon 2, exon 8, exon 43, exon 44, exon 45, exon 46, exon 50, exon 51, exon 52, exon 53 or exon 70.

[0469] In another method, Method 72, the present disclosure provides a method as provided in any one of Methods 70-71, wherein the locus, 5′ locus, or 3′ locus is proximal to a boundary of a single exon selected from the group consisting of exon 2, exon 8, exon 43, exon 44, exon 45, exon 46, exon 50, exon 51, exon 52, exon 53 and exon 70.

[0470] In another method, Method 73, the present disclosure provides a method as provided in Method 72, wherein proximal to the boundary of the exon includes the surrounding splice donors and acceptors of the neighboring intron or neighboring exon.

[0471] In another method, Method 74, the present disclosure provides a method as provided in any one of Methods 62-69, wherein the insertion is a multi-exon insertion.

[0472] In another method, Method 75, the present disclosure provides a method as provided in Method 74, wherein the multi-exon insertion is an insertion of exons 45-53 or exons 45-55.

[0473] In another method, Method 76, the present disclosure provides a method as provided in any one of Methods 74-75, wherein the locus, 5′ locus, or 3′ locus is proximal to a boundary of multiple-exons selected from the group consisting of exons 45-53 or exons 45-55.

[0474] In another method, Method 77, the present disclosure provides a method as provided in Method 76, wherein proximal to the boundary of the exon includes the surrounding splice donors and acceptors of the neighboring intron.

[0475] In another method, Method 78, the present disclosure provides a method as provided in any one of Methods 62 or 63, wherein the at least a portion of the wild-type dystrophin gene or cDNA includes at least a part of exon 1, exon 2, exon 3, exon 4, exon 5, exon 6, exon 7, exon 8, exon 9, exon 10, exon 11, exon 12, exon 13, exon 14, exon 15, exon 16, exon 17, exon 18, exon 19, exon 20, exon 21, exon 22, exon 23, exon 24, exon 25, exon 26, exon 27, exon 28, exon 29, exon 30, exon 31, exon 32, exon 33, exon 34, exon 35, exon 36, exon 37, exon 38, exon 39, exon 40, exon 41, exon 42, exon 43, exon 44, exon 45, exon 46, exon 47, exon 48, exon 49, exon 50, exon 51, exon 52, exon 53, exon 54, exon 55, exon 56, exon 57, exon 58, exon 59, exon 60, exon 61, exon 62, exon 63, exon 64, exon 65, exon 66, exon 67, exon 68, exon 69, exon 70, exon 71, exon 72, exon 73, exon 74, exon 75, exon 76, exon 77, exon 78, exon 79, intronic regions, synthetic intronic regions, fragments, combinations thereof, or the entire dystrophin gene or cDNA.

[0476] In another method, Method 79, the present disclosure provides a method as provided in any one of Methods 62 or 63, wherein the at least a portion of the wild-type dystrophin gene or cDNA includes exon 1, exon 2, exon 3, exon 4, exon 5, exon 6,

[0477] exon 7, exon 8, exon 9, exon 10, exon 11, exon 12, exon 13, exon 14, exon 15, exon 16, exon 17, exon 18, exon 19, exon 20, exon 21, exon 22, exon 23, exon 24, exon 25, exon 26, exon 27, exon 28, exon 29, exon 30, exon 31, exon 32, exon 33, exon 34, exon 35, exon 36, exon 37, exon 38, exon 39, exon 40, exon 41, exon 42, exon 43, exon 44, exon 45, exon 46, exon 47, exon 48, exon 49, exon 50, exon 51, exon 52, exon 53, exon 54, exon 55, exon 56, exon 57, exon 58, exon 59, exon 60, exon 61, exon 62, exon 63, exon 64, exon 65, exon 66, exon 67, exon 68, exon 69, exon 70, exon 71, exon 72, exon 73, exon 74, exon 75, exon 76, exon 77, exon 78, exon 79, intronic regions, synthetic intronic regions, fragments, combinations thereof, or the entire dystrophin gene or cDNA.

[0478] In another method, Method 80, the present disclosure provides a method as provided in any one of Methods 62-79, wherein the insertion is by homology directed repair (HDR).

[0479] In another method, Method 81, the present disclosure provides a method as provided in any one of Methods 62-80, wherein the donor template is a single or double stranded polynucleotide.

[0480] In another method, Method 82, the present disclosure provides a method as provided in any one of Methods 26-81, wherein the Cas9 or Cpf1 mRNA, gRNA, and donor template are each formulated into separate lipid nanoparticles or all co-formulated into a lipid nanoparticle.

[0481] In another method, Method 83, the present disclosure provides a method as provided in any one of Methods 26-81, wherein the Cas9 or Cpf1 mRNA is formulated into a lipid nanoparticle, and both the gRNA and donor template are delivered to the cell by an adeno-associated virus (AAV) vector.

[0482] In another method, Method 84, the present disclosure provides a method as provided in any one of Methods 26-81, wherein the Cas9 or Cpf1 mRNA is formulated into a lipid nanoparticle, and the gRNA is delivered to the cell by electroporation and donor template is delivered to the cell by an adeno-associated virus (AAV) vector.

[0483] In another method, Method 85, the present disclosure provides a method as provided in any one of Methods 1-84, wherein the dystrophin gene is located on Chromosome X: 31,117,228-33,344,609 (Genome Reference Consortium—GRCh38/hg38).

[0484] In a first composition, Composition 1, the present disclosure provides one or more guide ribonucleic acids (gRNAs) for editing a dystrophin gene in a cell from a patient with Duchenne Muscular Dystrophy (DMD), the one or more gRNAs comprising a spacer sequence selected from the group consisting of the nucleic acid sequences in SEQ ID Nos: 1-1,410,472 of the Sequence Listing.

[0485] In another composition, Composition 2, the present disclosure provides the one or more gRNAs of Composition 1, wherein the one or more gRNAs are one or more single-molecule guide RNAs (sgRNAs).

[0486] In another composition, Composition 3, the present disclosure provides the one or more gRNAs or sgRNAs of Compositions 1 or 2, wherein the one or more gRNAs or one or more sgRNAs is one or more modified gRNAs or one or more modified sgRNAs.

### Definitions

[0487] The term “comprising” or “comprises” is used in reference to compositions, methods, and respective component(s) thereof, that are essential to the invention, yet open to the inclusion of unspecified elements, whether essential or not.

[0488] The term “consisting essentially of” refers to those elements required for a given aspect. The term permits the presence of additional elements that do not materially affect the basic and novel or functional characteristic(s) of that aspect of the invention.

[0489] The term “consisting of” refers to compositions, methods, and respective components thereof as described herein, which are exclusive of any element not recited in that description of the aspect.

[0490] The singular forms “a,” “an,” and “the” include plural references, unless the context clearly dictates otherwise.

[0491] Any numerical range recited in this specification describes all sub-ranges of the same numerical precision (i.e., having the same number of specified digits) subsumed within the recited range. For example, a recited range of “1.0 to 10.0” describes all sub-ranges between (and including) the recited minimum value of 1.0 and the recited maximum value of 10.0, such as, for example, “2.4 to 7.6,” even if the range of “2.4 to 7.6” is not expressly recited in the text of the specification. Accordingly, the Applicant reserves the right to amend this specification, including the claims, to expressly recite any sub-range of the same numerical precision subsumed within the ranges expressly recited in this specification. All such ranges are inherently described in this specification such that amending to expressly recite any such sub-ranges will comply with written description, sufficiency of description, and added matter requirements, including the requirements under 35 U.S.C. § 112(a) and Article 123(2) EPC. Also, unless expressly specified or otherwise required by context, all numerical parameters described in this specification (such as those expressing values, ranges, amounts, percentages, and the like) may be read as if prefaced by the word “about,” even if the word “about” does not expressly appear before a number. Additionally, numerical parameters described in this specification should be construed in light of the number of reported significant digits, numerical precision, and by applying ordinary rounding techniques. It is also understood that numerical parameters described in this specification will necessarily possess the inherent variability characteristic of the underlying measurement techniques used to determine the numerical value of the parameter.

### EXAMPLES

[0492] The invention will be more fully understood by reference to the following examples, which provide illustrative non-limiting aspects of the invention.

[0493] The examples describe the use of the CRISPR system as an illustrative genome editing technique to create defined therapeutic genomic deletions, insertions, or replacements, collectively termed “genomic modifications” herein, in the dystrophin gene (DMD gene) that lead to permanent deletion or correction of problematic exons from the genomic locus that restore the dystrophin reading frame and restore the dystrophin protein activity.

[0494] Single gRNAs spanning different regions of the DMD gene were selected and tested for cutting efficiencies (Table 5). gRNAs were targeted to exons, introns, and the splice acceptors of multiple areas of interest in the DMD gene. The naming convention for all gRNAs discussed in the Examples is: #(corresponding to the gRNA)—NN (Cas protein: SP—S. pyogenes, SA—S. aureus, NM—N. meningitides, ST—S. thermophiles, TD—T. denticola, Cpf1)—NN ##(SA—Splice acceptor, E—Exon, I—Intron).

TABLE 5

| | | SEQ ID |
|---|---|---|
| gRNA Name | gRNA sequence | NO: |
| 1-NM-SA51 | AGTCTGAGTAGGAGCTAA | 1410400 |
| | AATATT | |
| 2-NM-SA44 | CTTGATCCATATGCTTTTA | 1410401 |
| | CCTGC | |
| 3-NM-SA52 | ATATTTGTTCTTACAGGCAA | 1410402 |
| | CAAT | |
| 1-ST-SA53 | CTGATTCTGAATTCTTTCAA | 534494 |
| 2-ST-SA53 | TTTTCCTTTTATTCTACTTG | 534495 |
| 3-ST-SA46 | TTCTTTTGTTCTTCTAGCCT | 537307 |
| 4-ST-SA46 | GTTCTTCTAGCCTGGAGAAA | 537308 |
| 5-ST-SA50 | ATCTTCTAACTTCCTCTTTA | 536097 |
| 6-ST-SA43 | TGTTTTAAAATTTTTATATT | 541322 |
| 1-SA-SA51 | TGAGTAGGAGCTAAAATATT | 485512 |
| 2-SA-SA45 | TTGGTATCTTACAGGAACTC | 490807 |
| 3-SA-SA53 | TGATTCTGAATTCTTTCAAC | 482860 |
| 4-SA-SA53 | TTTCCTTTTATTCTAGTTGA | 482861 |
| 5-SA-SA46 | TTCTTCTAGCCTGGAGAAAG | 489814 |
| 6-SA-SA43 | GTTTTAAAATTTTTATATTA | 499467 |
| 7-SA-SA55 | TCTGAACATTTGGTCCTTTG | 481421 |
| 8-SA-SA55 | AACATTTGGTCCTTTGCAGG | 481420 |
| 1-Cpf1-SA51 | TGCAAAAACCCAAAATATTTTAG | 1410403 |
| 2-Cpf1-SA51 | GCAAAAACCCAAAATATTTTAGC | 1410404 |
| 3-Cpf1-SA51 | CAAAAACCCAAAATATTTTAGCT | 1410405 |
| 4-Cpf1-SA45 | CCGCTGCCCAATGCCATCCTGGA | 1410406 |
| 5-Cpf1-SA45 | TGTTTTGCCTTTTTGGTATCTTA | 1410407 |
| 6-Cpf1-SA45 | GTTTTGCCTTTTTGGTATCTTAC | 1410408 |
| 7-Cpf1-SA45 | TTTTGCCTTTTTGGTATCTTACA | 1410409 |
| 8-Cpf1-SA45 | GCCTTTTTGGTATCTTACAGGAA | 1410410 |
| 9-Cpf1-SA45 | CCTTTTTGGTATCTTACAGGAAC | 1410411 |
| 10-Cpf1-SA45 | TGGTATCTTACAGGAACTCCAGG | 1410412 |
| 11-Cpf1-SA53 | TTTTTCCTTTTATTCTAGTTGAA | 1410413 |
| 12-Cpf1-SA53 | TCCTTTTATTCTAGTTGAAAGAA | 1410414 |
| 13-Cpf1-SA53 | CCTTTTATTCTAGTTGAAAGAAT | 1410415 |
| 14-Cpf1-SA44 | TCAACAGATCTGTCAAATCGCCT | 1410416 |
| 15-Cpf1-SA44 | TCTTGATCCATATGCTTTTACCT | 1410417 |
| 16-Cpf1-SA44 | CTTGATCCATATGCTTTTACCTG | 1410418 |
| 17-Cpf1-SA44 | TTGATCCATATGCTTTACCTGC | 1410419 |
| 18-Cpf1-SA46 | GTTCTTCTAGCCTGGAGAAAGAA | 1410420 |
| 19-Cpf1-SA46 | TTCTTCTAGCCTGGAGAAAGAAG | 1410421 |
| 20-Cpf1-SA46 | ATTCTTCTTTCTCCAGGCTAGAA | 1410422 |
| 21-Cpf1-SA46 | TTCTTCTTTCTCCAGGCTAGAAG | 1410423 |
| 22-Cpf1-SA43 | TTGTAGACTATCTTTTATATTCT | 1410424 |
| 23-Cpf1-SA43 | TACTGTTTTAAAATTTTTATATT | 1410425 |
| 24-Cpf1-SA43 | ACTGTTTTAAAATTTTTATATTA | 1410426 |
| 25-Cpf1-SA43 | CTGTTTTAAAATTTTTATATTAC | 1410427 |
| 26-Cpf1-SA43 | AAAATTTTTATATTACAGAATAT | 1410428 |
| 27-Cpf1-SA43 | AAATTTTTATATTACAGAATATA | 1410429 |
| 1-SP-SA51 | AAAATATTTTAGCTCCTACT | 145442 |
| 2-SP-SA51 | TGCAAAAACCCAAAATATTT | 145443 |
| 3-SP-SA45 | TGGTATCTTACAGGAACTCC | 186216 |
| 4-SP-SA45 | TTGGTATCTTACAGGAACTC | 186217 |
| 5-SP-SA45 | TGCCATCCTGGAGTTCCTGT | 186218 |
| 6-SP-SA45 | TTGCCTTTTTGGTATCTTAC | 186219 |
| 7-SP-SA45 | TTTGCCTTTTTGGTATCTTA | 186220 |
| 8-SP-SA53 | TGATTCTGAATTCTTTCAAC | 125451 |
| 9-SP-SA53 | TTTCCTTTTATTCTAGTTGA | 125452 |
| 10-SP-SA53 | AATTCTTTCAACTAGAATAA | 125453 |
| 11-SP-SA53 | ATTTATTTTTCCTTTTATTC | 125455 |
| 12-SP-SA53 | AlTCTTTCAACTAGAATAAA | 125454 |
| 13-SP-SA44 | AGATCTGTCAAATCGCCTGC | 237600 |
| 14-SP-SA44 | CAGATCTGTCAAATCGCCTG | 237599 |
| 15-SP-SA44 | GTCAAATCGCCTGCAGGTAA | 237602 |
| 16-SP-SA44 | GATCCATATGCTTTTACCTG | 237603 |
| 17-SP-SA44 | ATCCATATGCTTTTACCTGC | 237601 |
| 18-SP-SA46 | TTGTTCTTCTAGCCTGGAGA | 178873 |
| 19-SP-SA46 | ATTCTTTTGTTCTTCTAGCC | 178869 |
| 20-SP-SA46 | TTCTTCTAGCCTGGAGAAAG | 178875 |
| 21-SP-SA46 | TTCTTCTTTCTCCAGGCTAG | 178870 |
| 22-SP-SA46 | TCTTTTGTTCTTCTAGCCTG | 178871 |
| 23-SP-SA46 | AAGATATTCTTTTGTTCTTC | 178868 |
| 24-SP-SA46 | TTATTCTTCTTTCTCCAGGC | 178872 |
| 25-SP-SA46 | AATTTTATTCTTUTTTcrcc | 178874 |
| 26-SP-SA46 | CAATTTTATTUTTCTTTCTC | 178876 |
| 27-SP-SA52 | AATCCTGCATTGTTGCCTGT | 136213 |
| 28-SP-SA52 | TAAGGGATATTTGTTCTTAC | 136214 |
| 29-SP-SA52 | CTAAGGGATATTTGTTCTTA | 136215 |
| 30-SP-SA50 | ATGCTTTTCTGTTAAAGAGG | 155685 |
| 31-SP-SA50 | TGTATGCTTTTCTGTTAAAG | 155687 |
| 32-SP-SA50 | TCTTCTAACTTCCTCTTTAA | 155686 |
| 33-SP-SA50 | ATGTGTATGCTTTTCTGTTA | 155689 |
| 34-SP-SA50 | TTTTCTGTTAAAGAGGAAGT | 155684 |
| 35-SP-SA50 | GTGTATGCTTTTCTGTTAAA | 155688 |
| 36-SP-SA43 | TTTTATATTACAGAATATAA | 252291 |
| 37-SP-SA43 | GTTTTAAAATTTTTATATTA | 252292 |
| 38-SP-SA55 | CTGAACATTTGGTCCTTTGC | 114755 |
| 39-SP-SA55 | CATTTGGTCCTTTGCAGGGT | 114751 |
| 40-SP-SA55 | CTCGCTCACTCACCCTGCAA | 114753 |
| 41-SP-SA55 | TCTGAACATTTGGTCCTTTG | 114756 |
| 42-SP-SA55 | TGGTCCTTTGCAGGGTGAGT | 114750 |
| 43-SP-SA55 | TCTCGCTCACTCACCCTGCA | 114752 |
| 44-SP-SA55 | TGAACATTTGGTCCTTTGCA | 114754 |
| 1-SP-E51 | CCTACTCAGACTGTTACTC | 1410430 |
| 2-SP-E51 | ACTCTGGTGACACAACCTG | 1410431 |
| 3-SP-E51 | ACACAACCTGTGGTTACTA | 1410432 |
| 4-SP-E51 | ATGTTGGAGGTACCTGCTC | 1410433 |
| 5-SP-E51 | TGCTCTGGCAGATTTCAAC | 1410434 |
| 6-SP-E51 | GCTCTGGCAGATTTCAACC | 1410435 |
| 7-SP-E51 | GGCAGATTTCAACCGGGCT | 1410436 |
| 8-SP-E51 | TTGGACAGAACTTACCGAC | 1410437 |
| 9-SP-E51 | CATCTCGTTGATATCCTCA | 1410438 |
| 10-SP-E51 | GGTAAGTTCTGTCCAAGCC | 1410439 |
| 11-SP-E51 | GGTTGAAATCTGCCAGAGC | 1410440 |
| 12-SP-E51 | GCAGGTACCTCCAACATCA | 1410441 |
| 13-SP-E51 | GGCATTTCTAGTTTGGAGA | 1410442 |
| 14-SP-E51 | CAGTTTCCTTAGTAACCAC | 1410443 |
| 15-SP-E51 | CCAGAGTAACAGTCTGAGT | 1410444 |
| 16-SP-E45 | GGTATCTTACAGGAACTCC | 1410445 |
| 17-SP-E45 | TCTTACAGGAACTCCAGGA | 1410446 |
| 18-SP-E45 | AGGAACTCCAGGATGGCAT | 1410447 |
| 19-SP-E45 | GGAACTCCAGGATGGCATT | 1410448 |
| 20-SP-E45 | CCAGGATGGCATTGGGCAG | 1410449 |
| 21-SP-E45 | TCAGAACATTGAATGCAAC | 1410450 |
| 22-SP-E45 | AGAACATTGAATGCAACTG | 1410451 |
| 23-SP-E45 | ACAGATGCCAGTATTCTAC | 1410452 |
| 24-SP-E45 | ATTGGGAAGCCTGAATCTG | 1410453 |
| 25-SP-E45 | GGGAAGCCTGAATCTGCGG | 1410454 |
| 26-SP-E45 | AGCCTGAATCTGCGGTGGC | 1410455 |
| 27-SP-E45 | CTCCTGCCACCGCAGATTC | 1410456 |
| 28-SP-E45 | CCGCTGCCCAATGCCATCC | 1410457 |
| 29-SP-E53 | ACAAGAACACCTTCAGAAC | 1410458 |
| 30-SP-E53 | AGAACACCTTCAGAACCGG | 1410459 |
| 31-SP-E53 | GTTAAAGGATTCAACACAA | 1410460 |
| 32-SP-E53 | ACACAATGGCTGGAAGCTA | 1410461 |
| 33-SP-E53 | GCTGAGCAGGTCTTAGGAC | 1410462 |
| 34-SP-E53 | CAGAGCCAAGCTTGAGTCA | 1410463 |
| 35-SP-E53 | GCCAAGCTTGAGTCATGGA | 1410464 |
| 36-SP-E53 | ACAAGAACACCTTCAGAAC | 1410465 |
| 37-SP-E53 | AGAACACCTTCAGAACCGG | 1410466 |
| 38-SP-E53 | GTTAAAGGATTCAACACAA | 1410467 |
| 39-SP-E53 | ACACAATGGCTGGAAGCTA | 1410468 |
| 40-SP-E53 | AAGAAGCTGAGCAGGTCTT | 1410469 |
| 41-SP-E53 | GCTGAGCAGGTCTTAGGAC | 1410470 |
| 42-SP-E53 | CAGAGCCAAGCTTGAGTCA | 1410471 |
| 43-SP-E53 | GCCAAGCTTGAGTCATGGA | 1410472 |
| 1-SP-I52 | ACAGTGGTTTAAGTAATCCG | 136258 |
| 2-SP-I52 | GGAGACATTCCGGAGTACCT | 136257 |
| 3-SP-I52 | TTTGGAGAGCATCAGATTAC | 136337 |
| 4-SP-I52 | GTTTGGTGATTCTTACGGAC | 136306 |
| 5-SP-I52 | TCTGTGTGACGTCAAAATTA | 136275 |
| 6-SP-I52 | ATATGATGTTCTACCACATG | 136406 |
| 1-SP-I53 | GCCCACCCTACTACGGCATA | 136093 |
| 2-SP-I53 | CTGTACCTTATGCCGTAGTA | 136089 |
| 3-SP-I53 | ACTGTACCTTATGCCGTAGT | 136090 |
| 4-SP-I53 | TACCTTATGCCGTAGTAGGG | 136087 |
| 5-SP-I53 | ACCTTATGCCGTAGTAGGGT | 136086 |
| 6-SP-I53 | TGCACAGCGTCTAGTCAGAT | 136079 |
| 1-SP-I44 | CATCGCATAGTTTAGTATAT | 237710 |
| 2-SP-I44 | CTTAGGTAAACATACAGCCC | 237749 |
| 3-SP-I44 | ACTCCTTTCAGTTGATGAAC | 237661 |
| 4-SP-I44 | ATTTTAGATTGGAATACTGC | 237724 |
| 5-SP-I44 | GCCTCAGTCTCTTTTATGAC | 237740 |
| 6-SP-I44 | CTGCCTGTTCATCAACTGAA | 237664 |
| 1-SP-I45 | AATATTAGAGCACGGTGCTA | 237546 |
| 2-SP-I45 | CTCTATACAAATGCCAACGC | 237393 |
| 3-SP-I45 | CAGATAAACCAGCTCCGTCC | 237535 |
| 4-SP-I45 | AGGGAAGCATCGTAACAGCA | 237521 |
| 5-SP-I45 | ACTTGCATGCACACCAGCGT | 237394 |
| 6-SP-I45 | AGAGTTTGCCTGGACGGAGC | 237533 |
| 7-SP-I45 | TTAGTGATCGTGGATACGAG | 186301 |
| 8-SP-I45 | TTTGGGTTTCTTAGTGATCG | 186298 |
| 9-SP-I45 | AAAAACTGGAGCTAACCGAG | 186263 |
| 10-SP-I45 | CATTCAGATTTAAATACGGT | 186375 |
| 11-SP-145 | AAAACTGGAGCTAACCGAGA | 186262 |
| 12-SP-I45 | TTTGTAAGCTTGTCAGCTAG | 186274 |
| 1-SP-I46 | CAACTGCAGCAGCACGCATT | 186065 |
| 2-SP-I46 | CCACCTATTATGTGGATGAT | 186030 |
| 3-SP-I46 | ATATACTTGTGGCTAGTTAG | 186135 |
| 4-SP-I46 | CCCATCATCCACATAATAGG | 186025 |
| 5-SP-I46 | CCATTAAACTTGTACCTCTT | 186083 |
| 6-SP-I46 | CCACCCATCATCCACATAAT | 186027 |
| 1-SP-I54 | GCTGGGGACCGTTATCTATT | 121156 |
| 2-SP-I54 | GCACATTCACGTATTACTGC | 121149 |
| 3-SP-I54 | TTTAGTTGAACGCCAGTAGA | 121051 |
| 4-SP-I54 | CACATTCACGTATTACTGCT | 121150 |
| 5-SP-I54 | ACATTCACGTATTACTGCTG | 121151 |
| 6-SP-I54 | CGTGAATGTGCTAGTTTTAC | 121147 |
| 1-SP-I55 | TAGCTCCCTATTATATCACG | 120796 |
| 2-SP-I55 | GCCAAGTCCGTGAGTTTAGT | 120916 |
| 3-SP-I55 | CCTATTATATCACGTGGTTC | 120798 |
| 4-SP-I55 | CCTGAACCACGTGATATAAT | 120794 |
| 5-SP-I55 | CTGAACCACGTGATATAATA | 120793 |
| 6-SP-I55 | TTCTCATTTGATACATCCCC | 120802 |
| 49-SP-I50 | CATTGGCTTTGATTTCCCTA | 145522 |
| 51-SP-I51 | ACAGTTGCCTAAGAACTGGT | 145360 |
| 53-SP-I55 | GCCTTCTTTATCCCCTATCG | 91033 |
| 44-SP-E70 | ACTGGCAGGTAGCCCATTCG | 13562 |
| 45-SP-E70 | TTTGCGAAGCATCCCCGAAT | 13563 |
| 46-SP-E70 | TTTTGCGAAGCATCCCCGAA | 13564 |
| 47-SP-E70 | CACTGGCAGGTAGCCCATTC | 13561 |
| 48-SP-E70 | GCACTGGCAGGTAGCCCATT | 13560 |
| 54-SP-E55 | AGGATGCTACCCGTAAGGAA | 114709 |
| 55-SP-E55 | CCTTACGGGTAGCATCCTGT | 114716 |
| 56-SP-E55 | AACAACTGCCAATGTCCTAC | 114717 |
| 57-SP-E55 | ATTACTGCAACAGTTCCCCC | 114738 |
| 58-SP-E55 | GCAACAGTTCCCCCTGGACC | 114736 |
| 59-SP-E55 | TTCTAGGAGCUTTTCCTTAC | 114710 |
| 60-SP-E55 | AGGCTCCTAGAAGACTCCAA | 114700 |
| 61-SP-E55 | GGTAGCATCCTGTAGGACAT | 114719 |
| 62-SP-E55 | ACCTGGAAAAGTTTCTTGCC | 114728 |
| 63-SP-E55 | GCCAGGCAAGAAACTTTTCC | 114730 |

[0495] All tested gRNAs can be used for an HDR/correction based editing approach. Single gRNAs targeting the splice acceptors can be used to induce exon skipping to restore the reading frame of the DMD gene. Selected pairs of gRNAs can be used to make deletions in the DMD gene that restore the reading frame. Selected pairs of gRNAs can be used to make deletions that simulate patient mutations and can be used to generate model DMD mutant lines.

[0496] Various Cas orthologs were evaluated for cutting. SP, NM, ST, SA, and Cpf1 gRNAs were delivered as RNA, expressed from the U6 promoter in plasmids, or expressed from the U6 promoter in lentivirus. The corresponding Cas protein was either knocked into the cell line of interest and constitutively expressed, delivered as mRNA, or delivered as protein. The activity of the gRNAs in all the above mentioned formats were evaluated using TIDE analysis or next generation sequencing in HEK293T cells, K562 cells, or induced pluripotent stem cells (iPSCs).

[0497] Overall, it was determined that most gRNAs tested induced cutting. However, the amount of cutting was highly dependent on the Cas protein tested. It was found that, generally, SP Cas9 gRNAs induce the highest levels of cutting with SA Cas9 gRNAs inducing the second highest level of cutting. Generally, it is beneficial to select gRNAs for therapeutic application that have the highest cutting efficiency possible. However, for an iPSC based therapy, the cutting efficiency is not as important. iPSCs are highly proliferative and make it simple to isolate a clonal population of cells with the desired edit, even when the editing efficiency is less than 10%.

[0498] Introduction of the defined therapeutic modifications described above represents a novel therapeutic strategy for the potential amelioration of DMD, as further described and illustrated herein.

### Example 1—CRISPR/SPCas9 Target Sites for the Dystrophin Gene

[0499] Regions of the dystrophin gene were scanned for target sites. Each area was scanned for a protospacer adjacent motif (PAM) having the sequence NRG. gRNA 20 bp spacer sequences corresponding to the PAM were identified, as shown in SEQ ID NOs: 1-467,030. gRNA 19 bp spacer sequences corresponding to the PAM were identified, as shown in SEQ ID NOs: 1,410,430-1,410,472 of the Sequence Listing.

### Example 2—CRISPR/SACas9 Target Sites for the Dystrophin Gene

[0500] Regions of the dystrophin gene were scanned for target sites. Each area was scanned for a protospacer adjacent motif (PAM) having the sequence NNGRRT. gRNA 20 bp spacer sequences corresponding to the PAM were identified, as shown in SEQ ID NOs: 467,031-528,196 of the Sequence Listing.

### Example 3—CRISPR/STCas9 Target Sites for the Dystrophin Gene

[0501] Regions of the dystrophin gene were scanned for target sites. Each area was scanned for a protospacer adjacent motif (PAM) having the sequence NNAGAAW. gRNA 24 bp spacer sequences corresponding to the PAM were identified, as shown in SEQ ID NOs: 528,197-553,198 of the Sequence Listing.

### Example 4—CRISPR/TDCas9 Target Sites for the Dystrophin Gene

[0502] Regions of the dystrophin gene were scanned for target sites. Each area was scanned for a protospacer adjacent motif (PAM) having the sequence NAAAAC. gRNA 24 bp spacer sequences corresponding to the PAM were identified, as shown in SEQ ID NOs: 553,199-563,911 of the Sequence Listing.

### Example 5—CRISPR/NMCas9 Target Sites for the Dystrophin Gene

[0503] Regions of the dystrophin gene were scanned for target sites. Each area was scanned for a protospacer adjacent motif (PAM) having the sequence NNNNGHTT. gRNA 24 bp spacer sequences corresponding to the PAM were identified, as shown in SEQ ID NOs: 563,912-627,854 and 1,410,400-1,410,402 of the Sequence Listing.

### Example 6—CRISPR/Cpf1 Target Sites for the Dystrophin Gene

[0504] Regions of the dystrophin gene were scanned for target sites. Each area was scanned for a protospacer adjacent motif (PAM) having the sequence YTN. gRNA 20-24 bp spacer sequences corresponding to the PAM were identified, as shown in SEQ ID NOs: 627,855-1,410,399 and 1,410,403-1,410,429 of the Sequence Listing.

### Example 7—Illustrative Genome Editing Strategies Targeting Exon 2

[0505] Several methods provide gRNA pairs that delete exon 2 by cutting the gene twice, one gRNA cutting at the 5′ end of exon 2 and the other gRNA cutting at the 3′ end of exon 2.

### Example 8—Illustrative Genome Editing Strategies Targeting Exon 8

[0506] Several methods provide gRNA pairs that delete exon 8 by cutting the gene twice, one gRNA cutting at the 5′ end of exon 8 and the other gRNA cutting at the 3′ end of exon 8.

### Example 9—Illustrative Genome Editing Strategies Targeting Exon 43

[0507] Several methods provide gRNA pairs that delete exon 43 by cutting the gene twice, one gRNA cutting at the 5′ end of exon 43 and the other gRNA cutting at the 3′ end of exon 43.

### Example 10—Illustrative Genome Editing Strategies Targeting Exon 44

[0508] Several methods provide gRNA pairs that delete exon 44 by cutting the gene twice, one gRNA cutting at the 5′ end of exon 44 and the other gRNA cutting at the 3′ end of exon 44.

### Example 11—Illustrative Genome Editing Strategies Targeting Exon 45

[0509] Several methods provide gRNA pairs that delete exon 45 by cutting the gene twice, one gRNA cutting at the 5′ end of exon 45 and the other gRNA cutting at the 3′ end of exon 45.

### Example 12—Illustrative Genome Editing Strategies Targeting Exon 46

[0510] Several methods provide gRNA pairs that delete exon 46 by cutting the gene twice, one gRNA cutting at the 5′ end of exon 46 and the other gRNA cutting at the 3′ end of exon 46.

### Example 13—Illustrative Genome Editing Strategies Targeting Exon 50

[0511] Several methods provide gRNA pairs that delete exon 50 by cutting the gene twice, one gRNA cutting at the 5′ end of exon 50 and the other gRNA cutting at the 3′ end of exon 50.

### Example 14—Illustrative Genome Editing Strategies Targeting Exon 51

[0512] Several methods provide gRNA pairs that delete exon 51 by cutting the gene twice, one gRNA cutting at the 5′ end of exon 51 and the other gRNA cutting at the 3′ end of exon 51.

### Example 15—Illustrative Genome Editing Strategies Targeting Exon 52

[0513] Several methods provide gRNA pairs that delete exon 52 by cutting the gene twice, one gRNA cutting at the 5′ end of exon 52 and the other gRNA cutting at the 3′ end of exon 52.

### Example 16—Illustrative Genome Editing Strategies Targeting Exon 53

[0514] Several methods provide gRNA pairs that delete exon 53 by cutting the gene twice, one gRNA cutting at the 5′ end of exon 53 and the other gRNA cutting at the 3′ end of exon 53.

### Example 17—Illustrative Genome Editing Strategies Targeting Exon 70

[0515] Several methods provide gRNA pairs that delete exon 70 by cutting the gene twice, one gRNA cutting at the 5′ end of exon 70 and the other gRNA cutting at the 3′ end of exon 70.

### Example 18—Illustrative Genome Editing Strategies Targeting Exons 45-53

[0516] Several methods provide gRNA pairs that delete exons 45-53 by cutting the gene twice, one gRNA cutting at the 5′ end of exon 45 and the other gRNA cutting at the 3′ end of exon 53.

### Example 19—Illustrative Genome Editing Strategies Targeting Exons 45-55

[0517] Several methods provide gRNA pairs that delete exons 45-55 by cutting the gene twice, one gRNA cutting at the 5′ end of exon 45 and the other gRNA cutting at the 3′ end of exon 55.

### Example 20—Bioinformatics Analysis of the Guide Strands

[0518] Candidate guides were screened and selected in a multi-step process that involved both theoretical binding and experimentally assessed activity. By way of illustration, candidate guides having sequences that match a particular on-target site, such as a site within or near the dystrophin gene, with adjacent PAM can be assessed for their potential to cleave at off-target sites having similar sequences, using one or more of a variety of bioinformatics tools available for assessing off-target binding, as described and illustrated in more detail below, in order to assess the likelihood of effects at chromosomal positions other than those intended. Candidates predicted to have relatively lower potential for off-target activity can then be assessed experimentally to measure their on-target activity, and then off-target activities at various sites. Preferred guides have sufficiently high on-target activity to achieve desired levels of gene editing at the selected locus, and relatively lower off-target activity to reduce the likelihood of alterations at other chromosomal loci. The ratio of on-target to off-target activity is often referred to as the “specificity” of a guide.

[0519] For initial screening of predicted off-target activities, there are a number of bioinformatics tools known and publicly available that can be used to predict the most likely off-target sites; and since binding to target sites in the CRISPR/Cas9 nuclease system is driven by Watson-Crick base pairing between complementary sequences, the degree of dissimilarity (and therefore reduced potential for off-target binding) is essentially related to primary sequence differences: mismatches and bulges, i.e. bases that are changed to a non-complementary base, and insertions or deletions of bases in the potential off-target site relative to the target site. An exemplary bioinformatics tool called COSMID (CRISPR Off-target Sites with Mismatches, Insertions and Deletions) (available on the web at crispr.bme.gatech.edu) compiles such similarities. Other bioinformatics tools include, but are not limited to, GUIDO, autoCOSMID, and CCtop.

[0520] Bioinformatics were used to minimize off-target cleavage in order to reduce the detrimental effects of mutations and chromosomal rearrangements. Studies on CRISPR/Cas9 systems suggested the possibility of high off-target activity due to nonspecific hybridization of the guide strand to DNA sequences with base pair mismatches and/or bulges, particularly at positions distal from the PAM region. Therefore, it is important to have a bioinformatics tool that can identify potential off-target sites that have insertions and/or deletions between the RNA guide strand and genomic sequences, in addition to base-pair mismatches. The bioinformatics-based tool, COSMID (CRISPR Off-target Sites with Mismatches, Insertions and Deletions) was therefore used to search genomes for potential CRISPR off-target sites (available on the web at crispr.bme.gatech.edu). COSMID output ranked lists of the potential off-target sites based on the number and location of mismatches, allowing more informed choice of target sites, and avoiding the use of sites with more likely off-target cleavage.

[0521] Additional bioinformatics pipelines were employed that weigh the estimated on- and/or off-target activity of gRNA targeting sites in a region. Other features that can be used to predict activity include information about the cell type in question, DNA accessibility, chromatin state, transcription factor binding sites, transcription factor binding data, and other CHIP-seq data. Additional factors are weighed that predict editing efficiency, such as relative positions and directions of pairs of gRNAs, local sequence features and micro-homologies.

### Example 21—Testing of Preferred Guides in Cells for On-Target Activity

[0522] The gRNAs predicted to have the lowest off-target activity will then be tested for on-target activity in epithelial cells derived from a human embryonic kidney, HEK 293Ts, by transient transfection and evaluated for indel frequency using TIDE or next generation sequencing. TIDE is a web tool to rapidly assess genome editing by CRISPR-Cas9 of a target locus determined by a guide RNA (gRNA or sgRNA). Based on the quantitative sequence trace data from two standard capillary sequencing reactions, the TIDE software quantifies the editing efficacy and identifies the predominant types of insertions and deletions (indels) in the DNA of a targeted cell pool. See Brinkman et al, Nucl. Acids Res. (2014) for a detailed explanation and examples. Next-generation sequencing (NGS), also known as high-throughput sequencing, is the catch-all term used to describe a number of different modern sequencing technologies including: Illumina (Solexa) sequencing, Roche 454 sequencing, Ion torrent: Proton/PGM sequencing, and SOLiD sequencing. These recent technologies allow one to sequence DNA and RNA much more quickly and cheaply than the previously used Sanger sequencing, and as such have revolutionized the study of genomics and molecular biology. HEK 293Ts are a good model system for gene correction in iPSCs because both cell types are known to have loose chromatin structures.

[0523] Chromatin is organizing by coiling into discrete structures called nucleosomes. This coiling influences accessibility of the genomic material to transcriptional machinery. Regions of the genome that are open are termed euchromatin, while regions of tight coiling are called heterochromatin. It is a well accepted paradigm that stem cells have a generally loose chromatin conformation and as cells differentiate into more specialized cell types, certain regions of the genome become closed forming heterochromatin (Sims, R. J. and D. Reinberg (2009). “Stem cells: Escaping fates with open states.” Nature 460(7257): 802-803).

### Example 22—Testing in Relevant Model Cell Lines

[0524] Once all of the guide RNAs are evaluated individually and effective gRNAs are identified, all permutations of pairs of gRNAs will be tested in relevant model cell lines for their ability to modify the DNA sequence of the dystrophin gene that would be predicted to restore the dystrophin reading frame. Myoblast and iPSC cell lines with modifications similar or identical to those found in patient samples were generated. The cells are treated with the different individual and pairwise combinations of gRNAs and a donor DNA template, if and as applicable. Samples can then be evaluated for restoration of dystrophin expression using one or more biological methods known to those skilled in the art, for example, an enzyme-linked immunosorbent assay (ELISA) that specifically recognizes the C terminus of the dystrophin protein (note that truncated proteins do not contain an intact C terminus). The pairs of gRNAs that restore dystrophin expression can then be further evaluated by an additional biologic technique, such as Western blot to confirm expression of the appropriate size of dystrophin protein.

### Example 23—Testing Different Approaches for HDR Gene Editing

[0525] After testing the gRNAs for both on-target activity and off-target activity, exon correction and knock-in strategies will be tested for HDR gene editing.

[0526] For the exon correction approach, donor DNA template will be provided as a short single-stranded oligonucleotide, a short double-stranded oligonucleotide (PAM sequence intact/PAM sequence mutated), a long single-stranded DNA molecule (PAM sequence intact/PAM sequence mutated) or a long double-stranded DNA molecule (PAM sequence intact/PAM sequence mutated). In addition, the donor DNA template will be delivered by AAV.

[0527] For the DNA knock-in approach, a single-stranded or double-stranded DNA having homologous arms to the Xp21.2 locus can include 40 nt or more of a first target exon (the first coding exon) of the dystrophin gene, the complete coding DNA sequence (CDS) of the dystrophin gene and 3′UTR of the dystrophin gene, and at least 40 nt of the following intron. The single-stranded or double-stranded DNA having homologous arms to the Xp21.2 locus can include 80 nt or more of a first target exon (the first coding exon) of the dystrophin gene, the complete coding DNA sequence (CDS) of the dystrophin gene and 3′UTR of the dystrophin gene, and at least 80 nt of the following intron. The single-stranded or double-stranded DNA having homologous arms to the Xp21.2 locus can include 100 nt or more of a first target exon (the first coding exon) of the dystrophin gene, the complete coding DNA sequence (CDS) of the dystrophin gene and 3′UTR of the dystrophin gene, and at least 100 nt of the following intron. The single-stranded or double-stranded DNA having homologous arms to the Xp21.2 locus can include 150 nt or more of the first target exon (the first coding exon) of the dystrophin gene, the complete coding DNA sequence (CDS) of the dystrophin gene and 3′UTR of the dystrophin gene, and at least 150 nt of the following intron. The single-stranded or double-stranded DNA having homologous arms to the Xp21.2 locus can include 300 nt or more of the first target exon (the first coding exon) of the dystrophin gene, the complete coding DNA sequence (CDS) of the dystrophin gene and 3′UTR of the dystrophin gene, and at least 300 nt of the following intron. The single-stranded or double-stranded DNA having homologous arms to the Xp21.2 locus can include 400 nt or more of the first target exon (the first coding exon) of the dystrophin gene, the complete CDS of the dystrophin gene and 3′UTR of the dystrophin gene, and at least 400 nt of the following intron. Alternatively, the DNA template will be delivered by AAV.

[0528] For the cDNA knock-in approach, a single-stranded or double-stranded cDNA can include 40 nt or more of a single exon target of the dystrophin gene. The single-stranded or double-stranded cDNA can include 80 nt or more of a single exon target of the dystrophin gene. The single-stranded or double-stranded cDNA can include 100 nt or more of a single exon target of the dystrophin gene. The single-stranded or double-stranded cDNA can include 150 nt or more of a single exon target of the dystrophin gene. The single-stranded or double-stranded cDNA can include 300 nt or more of a single exon target of the dystrophin gene. The single-stranded or double-stranded cDNA can include 400 nt or more of a single exon target of the dystrophin gene. Alternatively, the DNA template will be delivered by AAV.

[0529] For the cDNA knock-in approach, a single-stranded or double-stranded cDNA can include 40 nt or more of a multiple exon target of the dystrophin gene. The single-stranded or double-stranded cDNA can include 80 nt or more of a multiple exon target of the dystrophin gene. The single-stranded or double-stranded cDNA can include 100 nt or more of a multiple exon target of the dystrophin gene. The single-stranded or double-stranded cDNA can include 150 nt or more of a multiple exon target of the dystrophin gene. The single-stranded or double-stranded cDNA can include 300 nt or more of a multiple exon target of the dystrophin gene. The single-stranded or double-stranded cDNA can include 400 nt or more of a multiple exon target of the dystrophin gene. Alternatively, the DNA template will be delivered by AAV.

### Example 24—Re-Assessment of Lead CRISPR-Cas9/DNA Donor Combinations

[0530] After testing the different strategies for HDR gene editing, the lead CRISPR-Cas9/DNA donor combinations will be re-assessed in therapeutically relevant cells for efficiency of deletion, recombination, and off-target specificity. Cas9 mRNA or RNP will be formulated into lipid nanoparticles for delivery, sgRNAs will be formulated into nanoparticles or delivered as AAV, and donor DNA will be formulated into nanoparticles or delivered as AAV.

### Example 25—In Vivo Testing in Relevant Animal Model

[0531] After the CRISPR-Cas9/DNA donor combinations have been re-assessed, the lead formulations will be tested in vivo in a therapeutically relevant mouse model.

[0532] Culture in human cells allows direct testing on the human target and the background human genome, as described above.

[0533] Preclinical efficacy and safety evaluations can be observed through engraftment of modified mouse or human cells in a therapeutically relevant mouse model. The modified cells can be observed in the months after engraftment.

### Example 26—Cutting Efficiency of S. pyogenes gRNAs Targeting Exons 45, 51, 53, 55, and 70 in the DMD Gene

[0534] S. pyogenes (SP) gRNAs were tested that target Exons 45, 51, 53, 55, and 70 in the DMD gene (FIGS. 3A-3B). Each of Exons 45, 51, 53, 55, and 70 may be edited using an HDR/correction based approach.

[0535] The SP gRNAs were cloned into plasmids that co-express the SP Cas protein. The plasmids were transfected into HEK293T cells using lipofectamine 2000. Cells were harvested 48 hours post transfection, the genomic DNA was isolated, and cutting efficiency was evaluated using TIDE analysis. Data was compiled from one experiment containing 3-4 replicates (N=3 to 4). Data was plotted as mean and SEM.

[0536] The data from FIGS. 3A-3B indicate that most gRNAs cut with efficiencies greater than 50% in HEK293T cells.

### Example 27—Cutting Efficiency of gRNAs Targeting the Splice Acceptor of Exons 43, 44, 45, 46, 50, 51, 52, 53, and 55 in the DMD Gene

[0537] A viable option for treating DMD is to induce exon skipping to restore the reading frame of the DMD gene. To induce exon skipping, the gene editing approach must remove the AG sequence just upstream of the exon that is recognized by endogenous splicing machinery. When a single gRNA induces a double stranded break, the cell will repair the break. Some fraction of the time, the endogenous repair machinery will make a mistake and either insert or delete bases adjacent to the cut site. The gRNAs that mutate the AG sequence are likely to induce exon skipping at this site as the splicing machinery will no longer be able to recognize this site as a splice acceptor site and will skip to the next splice acceptor of the neighboring exon.

[0538] S. pyogenes (SP), S. aureus (SA), S. thermophiles (ST), N. Meningitidis (NM), and Cpf1 gRNAs were designed and tested that target the splice acceptor of Exons 43, 44, 45, 46, 50, 51, 52, 53, and 55 in the DMD gene (FIGS. 4A, 4B, and 4C).

[0539] SP gRNAs were designed to target the splice acceptor of nine exons in the DMD gene. The gRNAs were ordered as split RNA gRNAs from Integrated DNA Technologies (IDT). The split gRNAs were annealed to the tracRNA per manufacturer's instructions. The annealed split gRNAs were then transfected into HEK293T cells that stably express the SP Cas9 protein cells using RNAiMax. Cells were harvested 48 hours post transfection, the genomic DNA was isolated, and cutting efficiency was evaluated using TIDE analysis (FIG. 4A). Data was compiled between two independent experiments each containing 3 replicates (N=2 to 6). Data was plotted as mean and SEM.

[0540] NM, ST, and SA gRNAs were designed to target the splice acceptor of nine exons. The gRNAs were cloned into plasmids that co-express the Cas protein of interest along with the corresponding gRNA. The plasmids were transfected into HEK293T cells using lipofectamine 2000. Cells were harvested 48 hours post transfection, the genomic DNA was isolated, and cutting efficiency was evaluated using TIDE analysis (FIG. 4B). Data was compiled between 2-4 independent experiments each containing 3 replicates (N=6 to 12). Data was plotted as mean and SEM.

[0541] Cpf1 gRNAs were designed to target the splice acceptor of nine exons in the DMD gene. The gRNAs were cloned into plasmids that express the gRNA. HEK293T were co-transfected with the gRNA plasmid of interest and a second plasmid expressing Cpf1 using lipofectamine 2000. Cells were harvested 48 hours post transfection, the genomic DNA was isolated, and cutting efficiency was evaluated using TIDE analysis (FIG. 4C). Data was compiled between two independent experiments each containing 3 replicates (N=3 to 6). Data was plotted as mean and SEM.

### Example 28—Cutting Efficiencies and Splice Acceptor Knock-Out Efficiencies of gRNAs Targeting Exons 43, 44, 45, 46, 50, 51, 52, 53, and 55 in the DMD Gene

[0542] Many of the splice acceptor targeting gRNAs cut efficiently at the desired splice site. To evaluate if the gRNA effectively knocked out the desired AG sequence, PCR amplicons around the cut site were submitted for next generation sequencing. The indel percentage reads where the splice acceptor site was removed were quantified (FIGS. 5A-B and FIG. 6). A number of promising gRNAs were identified including, but not limited to: 8-SA-SA55, 3-SP-SA45, 31-SP-SA50, and 40-SP-SA55 that remove the splice acceptor site in a large proportion of the reads.

[0543] S. pyogenes gRNAs were designed to target the splice acceptor of nine exons in the DMD gene. The gRNAs were ordered as split RNA gRNAs from IDT. The split gRNAs were annealed to the tracRNA per manufacturer's instructions. The annealed split gRNAs were transfected into HEK293T cells that stably express the S. pyogenes Cas9 protein cells using RNAiMax. Cells were harvested 48 hours post transfection, the genomic DNA was isolated, and the desired 100-250 bp PCR amplicons surrounding the desired splice acceptors were submitted for next generation sequencing. Data was compiled between two independent experiments each containing 3 replicates (N=6). Averages were presented as population averages (FIGS. 5A-B).

[0544] N. meningitides (NM), S. thermophiles (ST), and S. aureus (SA) gRNAs were designed to target the splice acceptor of nine exons. The gRNAs were cloned into plasmids that co-expresses the Cas protein of interest along with the corresponding gRNA. The plasmids were transfected into HEK293T cells using lipofectamine 2000. Cells were harvested 48 hours post transfection, the genomic DNA was isolated, and the desired 100-250 bp PCR amplicons surrounding the desired splice acceptors were submitted for next generation sequencing. Data was compiled between two independent experiments each containing 3 replicates (N=6). Averages were presented as population averages (FIG. 6).

### Example 29—Cutting Efficiency of gRNAs Targeting the Regions Surrounding Exons 44, 45, 52, and 54 of the DMD Gene

[0545] To effectively evaluate editing approaches, it is important to access patient cell lines for in-vitro testing. However, patient material may be difficult to access and there can be large patient-to-patient variation between samples. Therefore, it was important to create DMD mutant cell lines that mimic common patient mutations. This allows the researcher to test the efficacy of a repair strategy in the same background to ensure that variations in editing efficiency are not patient specific. To address this, a variety of gRNAs were designed that can be paired to create common deletions found in DMD patients (Δ52, Δ44, Δ45, and Δ54). The resulting cell lines can be corrected using either an HDR or exon skipping approach. It is important to note, that these gRNAs can be used for either the creation of the model line or an HDR based correction of mutations of interest.

[0546] The region (100 bp-1 kb upstream and downstream of the exon of interest) was screened using gRNA design software. The best 6 gRNAs based on fewest predicted off target effects were selected on each side of the exon of interest (such as Exons 44, 45, 52, and 54 of the DMD gene). The gRNAs were first evaluated in HEK293Ts for cutting efficiency (FIGS. 7A-7B) and confirmed for cutting efficiency in iPSC (FIGS. 8A-8B).

[0547] Single S. pyogenes gRNAs around exons 44, 45, 52, and 54 were selected. The gRNAs were ordered as split gRNA from IDT. Split gRNAs were annealed to the tracer sequence using manufacturer's instructions.

[0548] The annealed gRNAs were transfected into HEK293T that stably express the SP Cas9 protein cells using RNAiMax. Cells were harvested 48 hours post transfection, the genomic DNA was isolated, and cutting efficiency was evaluated using TIDE analysis (FIGS. 7A-7B). Data was compiled from one experiment each containing 3 replicates (N=1 to 3). Data was plotted as mean and SEM.

[0549] The annealed gRNAs were also subsequently complexed with Cas9 protein to form a ribonucleoprotein complex (RNP). The RNPs were transfected into iPSCs (DiPS 1016SevA) using RNAiMax. Cells were harvested 48 hours post transfection, the genomic DNA was isolated, and cutting efficiency was evaluated using TIDE analysis (FIG. 8A-8B). Data was compiled from one experiment containing 3 replicates (N=1 to 3). Data was plotted as mean and SEM.

[0550] Single S. pyogenes gRNAs around exons 44, 45, 52, and 54 were selected. The gRNAs were ordered as split gRNA from IDT. Split gRNAs were annealed to the tracer sequence using manufacturer's instructions. The gRNAs were transfected into HEK293T that stably express the SP Cas9 protein cells using RNAiMax. The same gRNAs were also complexed with Cas9 protein to form a ribonucleoprotein complex (RNP). The RNPs were transfected into iPSCs (DiPS 1016SevA) using RNAiMax. Cells were harvested 48 hours post transfection, the genomic DNA was isolated, and cutting was evaluated using TIDE analysis. Data was compiled from multiple experiments. Only average values were plotted.

[0551] There was a high correlation between editing efficiency in HEK293T cells and iPSCs with a Pearson correlation coefficient of 0.51 overall. As such, screening in HEK293T cells was considered to be a good surrogate for our therapeutic cell line of interest—iPSCs (FIG. 9).

### Example 30—Clonal Analysis of Clonal Deletion Events

[0552] gRNAs with cutting efficiencies over 20% in iPSCs were identified in each intron of interest except for intron 55. Single gRNAs were selected with the best cutting efficiencies to make the desired deletions.

[0553] Two pairs of gRNAs were used to create clonal Δ52 cell lines (1-SP-I52+2-SP-I53 and 2-SP-I52+2-SP-I53). Out of 261 total clones screened, 57 had the desired deletion as accessed by PCR analysis (FIGS. 10A, 10C).

[0554] To confirm the presence of the expected Δ52 deletion, genomic DNA from each clone of interest was harvested. PCR primers flanking the deletion were designed. Since the deletion was small (<900 bp), a single pair of primers could be used to detect the deletion. This would result in a smaller deletion band (˜500 bp) or a wild-type (WT) band (˜1000 bp). A representative gel of the deletion (del) or wild type (WT) product is shown in FIG. 10A.

[0555] The deletion even was confirmed in seven clones by submitting the deletion PCR product for Sanger sequencing (7/7 clones had the predicted deletion event with small insertions and deletions (FIGS. 11A-B). The deletion bands from seven clones (PCRs generated in FIG. 8A) were gel prepped and submitted for Sanger sequencing. Two clones created using gRNA 1-SP-I52 and 2-SP-I53 were sequenced and aligned to the predicted deletion product (assuming that S. pyogenes Cas9 cuts 3BP from the 3′ end of the gRNA (FIG. 11A). Five clones created using gRNA 2-SP-I52 and 2-SP-I53 were sequenced and aligned to the predicted deletion product (assuming that S. pyogenes Cas9 cuts 3BP from the 3′ end of the gRNA (FIG. 11B).

[0556] Similarly, two pairs of gRNAs were used to create clonal Δ44 cell lines (2-SP-I44+3-SP-I45 and 2-SP-I44+4-SP-I45). Out of 256 total clones screened, 16 had the desired deletion as accessed by PCR analysis (FIGS. 10B, 10C).

[0557] To confirm the presence of the expected Δ44 deletion, genomic DNA from each clone of interest was harvested. Since the Δ44 gRNAs produce a larger deletion compared to the A52 gRNAs, two pairs of PCR primers were designed to either detect a deletion band or WT band. The expected deletion band was ˜400 bp and the expected WT band was ˜500 bp. A representative gel of the deletion (del), wild type product (WT+), and a negative sample amplified with the wild type primers (WT−) is shown in FIG. 10B.

### Example 31—Lentiviral Screen

[0558] To identify a large spectrum of pairs of gRNAs able to induce Exon51 skipping, we conducted a large scale lentiviral screen. Intron 51 and Intron 52 genomic sequence were submitted for analysis using a gRNA design software. The resulting list of gRNAs were narrowed to about 3000 left and 3000 right gRNAs adjacent to the Exon 51 splice acceptor. The list was narrowed based on uniqueness of sequence (only gRNAs without a perfect match somewhere else in the genome were screened) and minimal predicted off targets. A left gRNA paired with a right gRNA should induce Exon 51 skipping. The 6000 gRNAs were cloned into a lentiviral vector that expressed each gRNA of interest from the U6 promoter and confers puromycin resistance. K562 cells were transduced with the virus at an MOI 2 and selected with puromycin to obtain a population of cells that were expressing a gRNA of interest. These cells were then nucleofected with Cas9 mRNA to induce a transient period of cutting. After 7 days, the cells were pelleted and the genomic DNA was extracted. The genomic DNA was enriched for the region of interest around Exon 51 using hybrid capture. The enriched DNA was submitted for next generation sequencing (FIGS. 19A-19VV).

### Example 32—In Vitro Transcribed (IVT) gRNA Screen

[0559] To identify a large spectrum of pairs of gRNAs able to induce Exon 45 skipping, an in vitro transcribed (IVT) gRNA screen was conducted. Intron 45 and Intron 46 genomic sequence was submitted for analysis using a gRNA design software. The resulting list of gRNAs were narrowed to a list of about 100 left and about 100 right gRNAs based on uniqueness of sequence (only gRNAs without a perfect match somewhere else in the genome were screened) and minimal predicted off targets. This set of gRNAs were in vitro transcribed, and transfected using messenger Max into HEK293T cells that stably express Cas9. Cells were harvested 48 hours post transfection, the genomic DNA was isolated, and cutting efficiency was evaluated using TIDE analysis. (FIGS. 12A-E). It was found that about 18% of the tested gRNAs induced cutting efficiencies over 50%.

### Example 33—Partial cDNA Knockin Between Exons 45-55 of the DMD Gene

[0560] Another approach for correcting the DMD gene is a partial cDNA knock-in. As proof of principle, a study was conducted to replace the region Exon 45-55 of the DMD gene (which could treat up to 62% of DMD patients). The cDNA for Exon 45-55 is 3.2 kb. Two solid phase synthesized gRNAs [one in Exon 45 (SEQ ID NO. 1410449) and a second in Exon 55 (SEQ ID NO 114738)] from Trilink were used for cutting. The two trilink gRNAs were complexed with Cas9 protein and nucleofected into iPSCs along with a plasmid donor. The plasmid donor was designed to have a 3.2 kb cassette (same size as the desired cDNA knock-in) that constitutively expressed GFP with 1 kb homology arms on each side to induce integration into the Exon 45 to 55 site. The cells were tracked over 23 days. All experimental conditions were nucleofected with high efficiency (over 60%); however, only GFP expression from cells that received the donor and gRNA stabilized over time, indicating that HDR occurred in about 16 percent of cells (FIG. 13A). The genomic DNA from these samples was isolated and tested for site specific integration of the donor construct. Samples were amplified with primers specific to the WT allele or the desired knock-in allele. As expected, both the WT and knock-in allele could be detected (FIG. 13B).

### Example 34—Internally Deleted Yet Functional Dystrophin Protein

[0561] As proof of concept, it was demonstrated that we can edit in iPSC, isolate a clonal population of edited cells, and differentiate those cells down the myogenic lineage to produce an internally deleted yet functional dystrophin protein.

[0562] One attractive method for correcting the DMD gene is to create a Δ45-55 deletion. This deletion maintains the DMD reading frame and can restore expression of dystrophin in about 62% of DMD patients. To create the desired Δ45-55 deletion, two published SP gRNAs (CR6: SEQ ID NO: 1,410,475 and CR36: SEQ ID NO: 91033) were cloned into plasmids that also express SP Cas9 T2A orange florescent protein (OFP).

| gRNA | gRNA sequence | PAM |
|---|---|---|
| CR6 | GGGGCTCCACCCTCACGAGT | GGG |
| CR36 | GCCTTCTTTATCCCCTATCG | AGG |

[0563] These two plasmids were co transfected into iPSCs using Mirus LT1 transfection reagent. Two days later the cells expressing Cas9 as indicated by OFP expression were isolated using florescence activated cell sorting (FACS). The cells were seeded at a low density and allowed to grow for 7-10 days until single cell clones appeared in the dishes. The clones were picked manually under a microscope and transferred into 96 well plates. Once the cells reached confluence, the samples were passaged 1:2 and genomic DNA was isolated from the remaining cells.

[0564] To identify clones with the desired deletion, a three primer PCR assay was designed (FIGS. 14A and 14B). The assay allows for detection of a wild type (WT) and deletion band in the same PCR reaction. Using this assay, we identified 26/100 clones that had the editing event (FIG. 14C).

[0565] To further validate that the clones had the desired Δ45-55 deletion, 5 clones were submitted for Sanger sequencing. All five were confirmed to have the desired deletion event. One clone had an insertion, and one a single base pair deletion. The other three clones contained perfect deletion events (FIG. 15).

[0566] All five clones that were sequenced, were also submitted for karyotyping, and found karyotypically normal. Furthermore, all clones maintained pluripotency and stained over 99% positive for both SSEA-4 and TRA-160 (FIGS. 16A-B).

[0567] Four of the clones were then differentiated into mytotubes using the published Chal et. al protocol. [Chal et. al (2015) Differentiation of Pluripotent stem cells to muscle fiber to model Duchenne Muscular Dystrophy. Nature Biotechnology] to induce expression of dystrophin. Samples were harvested for Western blot and immuno-histo-chemistry. All five edited clones induced expression of an internally deleted dystrophin protein (FIG. 17). The sizes were compared to protein isolated from HEK293T cells transfected with control cDNA plasmids that express either the WT dystrophin protein or the Δ45-55 dystrophin protein. The differentiated cells phenotypically produced myotubes as demonstrated by myosin heavy chain staining. Representative image of differentiated Clone 56 is shown in FIG. 18.

### Note Regarding Illustrative Aspects

[0568] While the present disclosure provides descriptions of various specific aspects for the purpose of illustrating various aspects of the present invention and/or its potential applications, it is understood that variations and modifications will occur to those skilled in the art. Accordingly, the invention or inventions described herein should be understood to be at least as broad as they are claimed, and not as more narrowly defined by particular illustrative aspects provided herein.

[0569] Any patent, publication, or other disclosure material identified herein is incorporated by reference into this specification in its entirety unless otherwise indicated, but only to the extent that the incorporated material does not conflict with existing descriptions, definitions, statements, or other disclosure material expressly set forth in this specification. As such, and to the extent necessary, the express disclosure as set forth in this specification supersedes any conflicting material incorporated by reference. Any material, or portion thereof, that is said to be incorporated by reference into this specification, but which conflicts with existing definitions, statements, or other disclosure material set forth herein, is only incorporated to the extent that no conflict arises between that incorporated material and the existing disclosure material. Applicants reserve the right to amend this specification to expressly recite any subject matter, or portion thereof, incorporated by reference herein.

The application's sequence listing, which the Patent Office published only in electronic form, follows.

SEQUENCE LISTING (1410490 sequences)

SEQ ID NO: 1-13559 - skipped (13559 entries)

SEQ ID NO: 13560 - DNA, 20 bp, synthetic construct
  source 1..20: mol_type = other DNA; note = chemically synthesized
gcactggcaggtagcccatt

SEQ ID NO: 13561 - DNA, 20 bp, synthetic construct
  source 1..20: mol_type = other DNA; note = chemically synthesized
cactggcaggtagcccattc

SEQ ID NO: 13562 - DNA, 20 bp, synthetic construct
  source 1..20: mol_type = other DNA; note = chemically synthesized
actggcaggtagcccattcg

SEQ ID NO: 13563 - DNA, 20 bp, synthetic construct
  source 1..20: mol_type = other DNA; note = chemically synthesized
tttgcgaagcatccccgaat

SEQ ID NO: 13564 - DNA, 20 bp, synthetic construct
  source 1..20: mol_type = other DNA; note = chemically synthesized
ttttgcgaagcatccccgaa

SEQ ID NO: 13565-91032 - skipped (77468 entries)

SEQ ID NO: 91033 - DNA, 20 bp, synthetic construct
  source 1..20: mol_type = other DNA; note = chemically synthesized
gccttctttatcccctatcg

SEQ ID NO: 91034-114699 - skipped (23666 entries)

SEQ ID NO: 114700 - DNA, 20 bp, synthetic construct
  source 1..20: mol_type = other DNA; note = chemically synthesized
aggctcctagaagactccaa

SEQ ID NO: 114701-114708 - skipped (8 entries)

SEQ ID NO: 114709 - DNA, 20 bp, synthetic construct
  source 1..20: mol_type = other DNA; note = chemically synthesized
aggatgctacccgtaaggaa

SEQ ID NO: 114710 - DNA, 20 bp, synthetic construct
  source 1..20: mol_type = other DNA; note = chemically synthesized
ttctaggagcctttccttac

SEQ ID NO: 114711-114715 - skipped (5 entries)

SEQ ID NO: 114716 - DNA, 20 bp, synthetic construct
  source 1..20: mol_type = other DNA; note = chemically synthesized
ccttacgggtagcatcctgt

SEQ ID NO: 114717 - DNA, 20 bp, synthetic construct
  source 1..20: mol_type = other DNA; note = chemically synthesized
aacaactgccaatgtcctac

SEQ ID NO: 114718 - skipped

SEQ ID NO: 114719 - DNA, 20 bp, synthetic construct
  source 1..20: mol_type = other DNA; note = chemically synthesized
ggtagcatcctgtaggacat

SEQ ID NO: 114720-114727 - skipped (8 entries)

SEQ ID NO: 114728 - DNA, 20 bp, synthetic construct
  source 1..20: mol_type = other DNA; note = chemically synthesized
acctggaaaagtttcttgcc

SEQ ID NO: 114729 - skipped

SEQ ID NO: 114730 - DNA, 20 bp, synthetic construct
  source 1..20: mol_type = other DNA; note = chemically synthesized
gccaggcaagaaacttttcc

SEQ ID NO: 114731-114735 - skipped (5 entries)

SEQ ID NO: 114736 - DNA, 20 bp, synthetic construct
  source 1..20: mol_type = other DNA; note = chemically synthesized
gcaacagttccccctggacc

SEQ ID NO: 114737 - skipped

SEQ ID NO: 114738 - DNA, 20 bp, synthetic construct
  source 1..20: mol_type = other DNA; note = chemically synthesized
attactgcaacagttccccc

SEQ ID NO: 114739-114749 - skipped (11 entries)

SEQ ID NO: 114750 - DNA, 20 bp, synthetic construct
  source 1..20: mol_type = other DNA; note = chemically synthesized
tggtcctttgcagggtgagt

SEQ ID NO: 114751 - DNA, 20 bp, synthetic construct
  source 1..20: mol_type = other DNA; note = chemically synthesized
catttggtcctttgcagggt

SEQ ID NO: 114752 - DNA, 20 bp, synthetic construct
  source 1..20: mol_type = other DNA; note = chemically synthesized
tctcgctcactcaccctgca

SEQ ID NO: 114753 - DNA, 20 bp, synthetic construct
  source 1..20: mol_type = other DNA; note = chemically synthesized
ctcgctcactcaccctgcaa

SEQ ID NO: 114754 - DNA, 20 bp, synthetic construct
  source 1..20: mol_type = other DNA; note = chemically synthesized
tgaacatttggtcctttgca

SEQ ID NO: 114755 - DNA, 20 bp, synthetic construct
  source 1..20: mol_type = other DNA; note = chemically synthesized
ctgaacatttggtcctttgc

SEQ ID NO: 114756 - DNA, 20 bp, synthetic construct
  source 1..20: mol_type = other DNA; note = chemically synthesized
tctgaacatttggtcctttg

SEQ ID NO: 114757-120792 - skipped (6036 entries)

SEQ ID NO: 120793 - DNA, 20 bp, synthetic construct
  source 1..20: mol_type = other DNA; note = chemically synthesized
ctgaaccacgtgatataata

SEQ ID NO: 120794 - DNA, 20 bp, synthetic construct
  source 1..20: mol_type = other DNA; note = chemically synthesized
cctgaaccacgtgatataat

SEQ ID NO: 120795 - skipped

SEQ ID NO: 120796 - DNA, 20 bp, synthetic construct
  source 1..20: mol_type = other DNA; note = chemically synthesized
tagctccctattatatcacg

SEQ ID NO: 120797 - skipped

SEQ ID NO: 120798 - DNA, 20 bp, synthetic construct
  source 1..20: mol_type = other DNA; note = chemically synthesized
cctattatatcacgtggttc

SEQ ID NO: 120799-120801 - skipped (3 entries)

SEQ ID NO: 120802 - DNA, 20 bp, synthetic construct
  source 1..20: mol_type = other DNA; note = chemically synthesized
ttctcatttgatacatcccc

SEQ ID NO: 120803-120915 - skipped (113 entries)

SEQ ID NO: 120916 - DNA, 20 bp, synthetic construct
  source 1..20: mol_type = other DNA; note = chemically synthesized
gccaagtccgtgagtttagt

SEQ ID NO: 120917-121050 - skipped (134 entries)

SEQ ID NO: 121051 - DNA, 20 bp, synthetic construct
  source 1..20: mol_type = other DNA; note = chemically synthesized
tttagttgaacgccagtaga

SEQ ID NO: 121052-121146 - skipped (95 entries)

SEQ ID NO: 121147 - DNA, 20 bp, synthetic construct
  source 1..20: mol_type = other DNA; note = chemically synthesized
cgtgaatgtgctagttttac

SEQ ID NO: 121148 - skipped

SEQ ID NO: 121149 - DNA, 20 bp, synthetic construct
  source 1..20: mol_type = other DNA; note = chemically synthesized
gcacattcacgtattactgc

SEQ ID NO: 121150 - DNA, 20 bp, synthetic construct
  source 1..20: mol_type = other DNA; note = chemically synthesized
cacattcacgtattactgct

SEQ ID NO: 121151 - DNA, 20 bp, synthetic construct
  source 1..20: mol_type = other DNA; note = chemically synthesized
acattcacgtattactgctg

SEQ ID NO: 121152-121155 - skipped (4 entries)

SEQ ID NO: 121156 - DNA, 20 bp, synthetic construct
  source 1..20: mol_type = other DNA; note = chemically synthesized
gctggggaccgttatctatt

SEQ ID NO: 121157-125450 - skipped (4294 entries)

SEQ ID NO: 125451 - DNA, 20 bp, synthetic construct
  source 1..20: mol_type = other DNA; note = chemically synthesized
tgattctgaattctttcaac

SEQ ID NO: 125452 - DNA, 20 bp, synthetic construct
  source 1..20: mol_type = other DNA; note = chemically synthesized
tttccttttattctagttga

SEQ ID NO: 125453 - DNA, 20 bp, synthetic construct
  source 1..20: mol_type = other DNA; note = chemically synthesized
aattctttcaactagaataa

SEQ ID NO: 125454 - DNA, 20 bp, synthetic construct
  source 1..20: mol_type = other DNA; note = chemically synthesized
attctttcaactagaataaa

SEQ ID NO: 125455 - DNA, 20 bp, synthetic construct
  source 1..20: mol_type = other DNA; note = chemically synthesized
atttatttttccttttattc

SEQ ID NO: 125456-136078 - skipped (10623 entries)

SEQ ID NO: 136079 - DNA, 20 bp, synthetic construct
  source 1..20: mol_type = other DNA; note = chemically synthesized
tgcacagcgtctagtcagat

SEQ ID NO: 136080-136085 - skipped (6 entries)

SEQ ID NO: 136086 - DNA, 20 bp, synthetic construct
  source 1..20: mol_type = other DNA; note = chemically synthesized
accttatgccgtagtagggt

SEQ ID NO: 136087 - DNA, 20 bp, synthetic construct
  source 1..20: mol_type = other DNA; note = chemically synthesized
taccttatgccgtagtaggg

SEQ ID NO: 136088 - skipped

SEQ ID NO: 136089 - DNA, 20 bp, synthetic construct
  source 1..20: mol_type = other DNA; note = chemically synthesized
ctgtaccttatgccgtagta

SEQ ID NO: 136090 - DNA, 20 bp, synthetic construct
  source 1..20: mol_type = other DNA; note = chemically synthesized
actgtaccttatgccgtagt

SEQ ID NO: 136091-136092 - skipped (2 entries)

SEQ ID NO: 136093 - DNA, 20 bp, synthetic construct
  source 1..20: mol_type = other DNA; note = chemically synthesized
gcccaccctactacggcata

SEQ ID NO: 136094-136212 - skipped (119 entries)

SEQ ID NO: 136213 - DNA, 20 bp, synthetic construct
  source 1..20: mol_type = other DNA; note = chemically synthesized
aatcctgcattgttgcctgt

SEQ ID NO: 136214 - DNA, 20 bp, synthetic construct
  source 1..20: mol_type = other DNA; note = chemically synthesized
taagggatatttgttcttac

SEQ ID NO: 136215 - DNA, 20 bp, synthetic construct
  source 1..20: mol_type = other DNA; note = chemically synthesized
ctaagggatatttgttctta

SEQ ID NO: 136216-136256 - skipped (41 entries)

SEQ ID NO: 136257 - DNA, 20 bp, synthetic construct
  source 1..20: mol_type = other DNA; note = chemically synthesized
ggagacattccggagtacct

SEQ ID NO: 136258 - DNA, 20 bp, synthetic construct
  source 1..20: mol_type = other DNA; note = chemically synthesized
acagtggtttaagtaatccg

SEQ ID NO: 136259-136260 - skipped (2 entries)

SEQ ID NO: 136261 - DNA, 20 bp, synthetic construct
  source 1..20: mol_type = other DNA; note = chemically synthesized
tactcaaggcattcagacag

SEQ ID NO: 136262-136274 - skipped (13 entries)

SEQ ID NO: 136275 - DNA, 20 bp, synthetic construct
  source 1..20: mol_type = other DNA; note = chemically synthesized
tctgtgtgacgtcaaaatta

SEQ ID NO: 136276-136285 - skipped (10 entries)

SEQ ID NO: 136286 - DNA, 20 bp, synthetic construct
  source 1..20: mol_type = other DNA; note = chemically synthesized
ttgacaggtgagaaatctca

SEQ ID NO: 136287-136305 - skipped (19 entries)

SEQ ID NO: 136306 - DNA, 20 bp, synthetic construct
  source 1..20: mol_type = other DNA; note = chemically synthesized
gtttggtgattcttacggac

SEQ ID NO: 136307-136336 - skipped (30 entries)

SEQ ID NO: 136337 - DNA, 20 bp, synthetic construct
  source 1..20: mol_type = other DNA; note = chemically synthesized
tttggagagcatcagattac

SEQ ID NO: 136338-136405 - skipped (68 entries)

SEQ ID NO: 136406 - DNA, 20 bp, synthetic construct
  source 1..20: mol_type = other DNA; note = chemically synthesized
atatgatgttctaccacatg

SEQ ID NO: 136407-136413 - skipped (7 entries)

SEQ ID NO: 136414 - DNA, 20 bp, synthetic construct
  source 1..20: mol_type = other DNA; note = chemically synthesized
tgaagatgaagagatgaaag

SEQ ID NO: 136415-136491 - skipped (77 entries)

SEQ ID NO: 136492 - DNA, 20 bp, synthetic construct
  source 1..20: mol_type = other DNA; note = chemically synthesized
aagacagctattgaagtaag

SEQ ID NO: 136493-136511 - skipped (19 entries)

SEQ ID NO: 136512 - DNA, 20 bp, synthetic construct
  source 1..20: mol_type = other DNA; note = chemically synthesized
agagtttcacattctaacac

SEQ ID NO: 136513-136515 - skipped (3 entries)

SEQ ID NO: 136516 - DNA, 20 bp, synthetic construct
  source 1..20: mol_type = other DNA; note = chemically synthesized
aactctggtcatctgtgaca

SEQ ID NO: 136517-136533 - skipped (17 entries)

SEQ ID NO: 136534 - DNA, 20 bp, synthetic construct
  source 1..20: mol_type = other DNA; note = chemically synthesized
tgacttcatctgaggtttct

SEQ ID NO: 136535 - skipped

SEQ ID NO: 136536 - DNA, 20 bp, synthetic construct
  source 1..20: mol_type = other DNA; note = chemically synthesized
ttgacttcatctgaggtttc

SEQ ID NO: 136537-136557 - skipped (21 entries)

SEQ ID NO: 136558 - DNA, 20 bp, synthetic construct
  source 1..20: mol_type = other DNA; note = chemically synthesized
tcagcactaggcactattct

SEQ ID NO: 136559-136606 - skipped (48 entries)

SEQ ID NO: 136607 - DNA, 20 bp, synthetic construct
  source 1..20: mol_type = other DNA; note = chemically synthesized
aaaagctgttcattgtggtc

SEQ ID NO: 136608-136632 - skipped (25 entries)

SEQ ID NO: 136633 - DNA, 20 bp, synthetic construct
  source 1..20: mol_type = other DNA; note = chemically synthesized
tgtgaaacctgttctctagt

SEQ ID NO: 136634-136765 - skipped (132 entries)

SEQ ID NO: 136766 - DNA, 20 bp, synthetic construct
  source 1..20: mol_type = other DNA; note = chemically synthesized
tggtaggggtagcagattgg

SEQ ID NO: 136767-136773 - skipped (7 entries)

SEQ ID NO: 136774 - DNA, 20 bp, synthetic construct
  source 1..20: mol_type = other DNA; note = chemically synthesized
tgggagagtaacatctggta

SEQ ID NO: 136775-136786 - skipped (12 entries)

SEQ ID NO: 136787 - DNA, 20 bp, synthetic construct
  source 1..20: mol_type = other DNA; note = chemically synthesized
aaaggaccagaggtcatatg

SEQ ID NO: 136788-136799 - skipped (12 entries)

SEQ ID NO: 136800 - DNA, 20 bp, synthetic construct
  source 1..20: mol_type = other DNA; note = chemically synthesized
tgtttgttatgactaaagct

SEQ ID NO: 136801-136826 - skipped (26 entries)

SEQ ID NO: 136827 - DNA, 20 bp, synthetic construct
  source 1..20: mol_type = other DNA; note = chemically synthesized
catggattctatcattctag

SEQ ID NO: 136828-136836 - skipped (9 entries)

SEQ ID NO: 136837 - DNA, 20 bp, synthetic construct
  source 1..20: mol_type = other DNA; note = chemically synthesized
aggaatcaatgctatttcta

SEQ ID NO: 136838-136864 - skipped (27 entries)

SEQ ID NO: 136865 - DNA, 20 bp, synthetic construct
  source 1..20: mol_type = other DNA; note = chemically synthesized
ttccactagctgagcaaaga

SEQ ID NO: 136866 - skipped

SEQ ID NO: 136867 - DNA, 20 bp, synthetic construct
  source 1..20: mol_type = other DNA; note = chemically synthesized
cactagctgagcaaagatgg

SEQ ID NO: 136868-136888 - skipped (21 entries)

SEQ ID NO: 136889 - DNA, 20 bp, synthetic construct
  source 1..20: mol_type = other DNA; note = chemically synthesized
aaatagcaaccctatgaaat

SEQ ID NO: 136890-136937 - skipped (48 entries)

SEQ ID NO: 136938 - DNA, 20 bp, synthetic construct
  source 1..20: mol_type = other DNA; note = chemically synthesized
tcagaaggtaaaagagttta

SEQ ID NO: 136939-136954 - skipped (16 entries)

SEQ ID NO: 136955 - DNA, 20 bp, synthetic construct
  source 1..20: mol_type = other DNA; note = chemically synthesized
tagcctttctagttaccgaa

SEQ ID NO: 136956-136957 - skipped (2 entries)

SEQ ID NO: 136958 - DNA, 20 bp, synthetic construct
  source 1..20: mol_type = other DNA; note = chemically synthesized
agttaccgaaagggttttac

SEQ ID NO: 136959-136967 - skipped (9 entries)

SEQ ID NO: 136968 - DNA, 20 bp, synthetic construct
  source 1..20: mol_type = other DNA; note = chemically synthesized
gaagaagatgctcagtgaga

SEQ ID NO: 136969-136970 - skipped (2 entries)

SEQ ID NO: 136971 - DNA, 20 bp, synthetic construct
  source 1..20: mol_type = other DNA; note = chemically synthesized
tctcactgagcatcttcttc

SEQ ID NO: 136972-136980 - skipped (9 entries)

SEQ ID NO: 136981 - DNA, 20 bp, synthetic construct
  source 1..20: mol_type = other DNA; note = chemically synthesized
tttggccactctatttggag

SEQ ID NO: 136982-136987 - skipped (6 entries)

SEQ ID NO: 136988 - DNA, 20 bp, synthetic construct
  source 1..20: mol_type = other DNA; note = chemically synthesized
taagtggaagacaatgagga

SEQ ID NO: 136989-136991 - skipped (3 entries)

SEQ ID NO: 136992 - DNA, 20 bp, synthetic construct
  source 1..20: mol_type = other DNA; note = chemically synthesized
atgagaagtgaggaagtaag

SEQ ID NO: 136993-137017 - skipped (25 entries)

SEQ ID NO: 137018 - DNA, 20 bp, synthetic construct
  source 1..20: mol_type = other DNA; note = chemically synthesized
tgttctactagcacctccat

SEQ ID NO: 137019-137088 - skipped (70 entries)

SEQ ID NO: 137089 - DNA, 20 bp, synthetic construct
  source 1..20: mol_type = other DNA; note = chemically synthesized
caaagtcaggaaatttagcg

SEQ ID NO: 137090-137121 - skipped (32 entries)

SEQ ID NO: 137122 - DNA, 20 bp, synthetic construct
  source 1..20: mol_type = other DNA; note = chemically synthesized
gtgttataaagttcaaagaa

SEQ ID NO: 137123-137147 - skipped (25 entries)

SEQ ID NO: 137148 - DNA, 20 bp, synthetic construct
  source 1..20: mol_type = other DNA; note = chemically synthesized
gttgtgtcactcattgagct

SEQ ID NO: 137149-137167 - skipped (19 entries)

SEQ ID NO: 137168 - DNA, 20 bp, synthetic construct
  source 1..20: mol_type = other DNA; note = chemically synthesized
aacaaacgagtagtgatgac

SEQ ID NO: 137169-137175 - skipped (7 entries)

SEQ ID NO: 137176 - DNA, 20 bp, synthetic construct
  source 1..20: mol_type = other DNA; note = chemically synthesized
acaacctgaggtattatggt

SEQ ID NO: 137177-137204 - skipped (28 entries)

SEQ ID NO: 137205 - DNA, 20 bp, synthetic construct
  source 1..20: mol_type = other DNA; note = chemically synthesized
cacttgggtatgaggagcag

SEQ ID NO: 137206-137214 - skipped (9 entries)

SEQ ID NO: 137215 - DNA, 20 bp, synthetic construct
  source 1..20: mol_type = other DNA; note = chemically synthesized
aggcctgcatattctcatgg

SEQ ID NO: 137216-137217 - skipped (2 entries)

SEQ ID NO: 137218 - DNA, 20 bp, synthetic construct
  source 1..20: mol_type = other DNA; note = chemically synthesized
tggccaccatgagaatatgc

SEQ ID NO: 137219-137225 - skipped (7 entries)

SEQ ID NO: 137226 - DNA, 20 bp, synthetic construct
  source 1..20: mol_type = other DNA; note = chemically synthesized
tattgggtcttaactgactg

SEQ ID NO: 137227-137245 - skipped (19 entries)

SEQ ID NO: 137246 - DNA, 20 bp, synthetic construct
  source 1..20: mol_type = other DNA; note = chemically synthesized
acttctcctcacccaatgat

SEQ ID NO: 137247 - DNA, 20 bp, synthetic construct
  source 1..20: mol_type = other DNA; note = chemically synthesized
cttctcctcacccaatgatt

SEQ ID NO: 137248 - DNA, 20 bp, synthetic construct
  source 1..20: mol_type = other DNA; note = chemically synthesized
tcccaccacacccaatcatt

SEQ ID NO: 137249 - DNA, 20 bp, synthetic construct
  source 1..20: mol_type = other DNA; note = chemically synthesized
ttcccaccacacccaatcat

SEQ ID NO: 137250-137263 - skipped (14 entries)

SEQ ID NO: 137264 - DNA, 20 bp, synthetic construct
  source 1..20: mol_type = other DNA; note = chemically synthesized
aagaagtcccatgtctccca

SEQ ID NO: 137265 - skipped

SEQ ID NO: 137266 - DNA, 20 bp, synthetic construct
  source 1..20: mol_type = other DNA; note = chemically synthesized
agagccttccttgggagaca

SEQ ID NO: 137267 - DNA, 20 bp, synthetic construct
  source 1..20: mol_type = other DNA; note = chemically synthesized
gagccttccttgggagacat

SEQ ID NO: 137268-137285 - skipped (18 entries)

SEQ ID NO: 137286 - DNA, 20 bp, synthetic construct
  source 1..20: mol_type = other DNA; note = chemically synthesized
catcccagtgtgcggtctag

SEQ ID NO: 137287-137300 - skipped (14 entries)

SEQ ID NO: 137301 - DNA, 20 bp, synthetic construct
  source 1..20: mol_type = other DNA; note = chemically synthesized
gactctgcaaggaagagaga

SEQ ID NO: 137302-137315 - skipped (14 entries)

SEQ ID NO: 137316 - DNA, 20 bp, synthetic construct
  source 1..20: mol_type = other DNA; note = chemically synthesized
aacatctcttgcaccttcct

SEQ ID NO: 137317-137342 - skipped (26 entries)

SEQ ID NO: 137343 - DNA, 20 bp, synthetic construct
  source 1..20: mol_type = other DNA; note = chemically synthesized
caaaagtgagtgtattagtc

SEQ ID NO: 137344-137380 - skipped (37 entries)

SEQ ID NO: 137381 - DNA, 20 bp, synthetic construct
  source 1..20: mol_type = other DNA; note = chemically synthesized
catcttaagaggccagccca

SEQ ID NO: 137382-137398 - skipped (17 entries)

SEQ ID NO: 137399 - DNA, 20 bp, synthetic construct
  source 1..20: mol_type = other DNA; note = chemically synthesized
tctgcgctccttggaaataa

SEQ ID NO: 137400 - skipped

SEQ ID NO: 137401 - DNA, 20 bp, synthetic construct
  source 1..20: mol_type = other DNA; note = chemically synthesized
gtgcatgaccattatttcca

SEQ ID NO: 137402-137406 - skipped (5 entries)

SEQ ID NO: 137407 - DNA, 20 bp, synthetic construct
  source 1..20: mol_type = other DNA; note = chemically synthesized
ggagcgcagaatttaactgg

SEQ ID NO: 137408-137442 - skipped (35 entries)

SEQ ID NO: 137443 - DNA, 20 bp, synthetic construct
  source 1..20: mol_type = other DNA; note = chemically synthesized
agagatggcaaaaggaactt

SEQ ID NO: 137444 - DNA, 20 bp, synthetic construct
  source 1..20: mol_type = other DNA; note = chemically synthesized
gagatggcaaaaggaacttt

SEQ ID NO: 137445 - DNA, 20 bp, synthetic construct
  source 1..20: mol_type = other DNA; note = chemically synthesized
agatggcaaaaggaactttg

SEQ ID NO: 137446-137473 - skipped (28 entries)

SEQ ID NO: 137474 - DNA, 20 bp, synthetic construct
  source 1..20: mol_type = other DNA; note = chemically synthesized
tacgttcaagaagctggtcc

SEQ ID NO: 137475-137557 - skipped (83 entries)

SEQ ID NO: 137558 - DNA, 20 bp, synthetic construct
  source 1..20: mol_type = other DNA; note = chemically synthesized
ggcctcaggaaaagctgaac

SEQ ID NO: 137559-137566 - skipped (8 entries)

SEQ ID NO: 137567 - DNA, 20 bp, synthetic construct
  source 1..20: mol_type = other DNA; note = chemically synthesized
gttagaagtggttccaaggt

SEQ ID NO: 137568 - DNA, 20 bp, synthetic construct
  source 1..20: mol_type = other DNA; note = chemically synthesized
tagtgatgacagtcccacct

SEQ ID NO: 137569-137583 - skipped (15 entries)

SEQ ID NO: 137584 - DNA, 20 bp, synthetic construct
  source 1..20: mol_type = other DNA; note = chemically synthesized
tagggaaacgacaaagaaag

SEQ ID NO: 137585-137595 - skipped (11 entries)

SEQ ID NO: 137596 - DNA, 20 bp, synthetic construct
  source 1..20: mol_type = other DNA; note = chemically synthesized
atcattgttgctgaagccac

SEQ ID NO: 137597-137598 - skipped (2 entries)

SEQ ID NO: 137599 - DNA, 20 bp, synthetic construct
  source 1..20: mol_type = other DNA; note = chemically synthesized
tgtggcttcagcaacaatga

SEQ ID NO: 137600-137618 - skipped (19 entries)

SEQ ID NO: 137619 - DNA, 20 bp, synthetic construct
  source 1..20: mol_type = other DNA; note = chemically synthesized
tccaaggctaggatagactt

SEQ ID NO: 137620-137628 - skipped (9 entries)

SEQ ID NO: 137629 - DNA, 20 bp, synthetic construct
  source 1..20: mol_type = other DNA; note = chemically synthesized
atgtgtactagctgagtgct

SEQ ID NO: 137630-137651 - skipped (22 entries)

SEQ ID NO: 137652 - DNA, 20 bp, synthetic construct
  source 1..20: mol_type = other DNA; note = chemically synthesized
tatgctgtgatagactcttt

SEQ ID NO: 137653-137728 - skipped (76 entries)

SEQ ID NO: 137729 - DNA, 20 bp, synthetic construct
  source 1..20: mol_type = other DNA; note = chemically synthesized
agtggcagaacttctaacat

SEQ ID NO: 137730-137773 - skipped (44 entries)

SEQ ID NO: 137774 - DNA, 20 bp, synthetic construct
  source 1..20: mol_type = other DNA; note = chemically synthesized
attatattctgaatcagtca

SEQ ID NO: 137775-137795 - skipped (21 entries)

SEQ ID NO: 137796 - DNA, 20 bp, synthetic construct
  source 1..20: mol_type = other DNA; note = chemically synthesized
cctcaaggcctgaaaggcta

SEQ ID NO: 137797-137799 - skipped (3 entries)

SEQ ID NO: 137800 - DNA, 20 bp, synthetic construct
  source 1..20: mol_type = other DNA; note = chemically synthesized
aggcctgaaaggctaagggg

SEQ ID NO: 137801-137815 - skipped (15 entries)

SEQ ID NO: 137816 - DNA, 20 bp, synthetic construct
  source 1..20: mol_type = other DNA; note = chemically synthesized
cagggacaagacctcttgac

SEQ ID NO: 137817 - DNA, 20 bp, synthetic construct
  source 1..20: mol_type = other DNA; note = chemically synthesized
cagccccagctcctgtcaag

SEQ ID NO: 137818-137820 - skipped (3 entries)

SEQ ID NO: 137821 - DNA, 20 bp, synthetic construct
  source 1..20: mol_type = other DNA; note = chemically synthesized
caagacctcttgacaggagc

SEQ ID NO: 137822-137826 - skipped (5 entries)

SEQ ID NO: 137827 - DNA, 20 bp, synthetic construct
  source 1..20: mol_type = other DNA; note = chemically synthesized
ggagctggggctgtgagtaa

SEQ ID NO: 137828-137833 - skipped (6 entries)

SEQ ID NO: 137834 - DNA, 20 bp, synthetic construct
  source 1..20: mol_type = other DNA; note = chemically synthesized
gatgagaggagagtgagtcg

SEQ ID NO: 137835-137854 - skipped (20 entries)

SEQ ID NO: 137855 - DNA, 20 bp, synthetic construct
  source 1..20: mol_type = other DNA; note = chemically synthesized
cattgggcttgcttgtctat

SEQ ID NO: 137856-137859 - skipped (4 entries)

SEQ ID NO: 137860 - DNA, 20 bp, synthetic construct
  source 1..20: mol_type = other DNA; note = chemically synthesized
gcccaatgctactgccatat

SEQ ID NO: 137861 - skipped

SEQ ID NO: 137862 - DNA, 20 bp, synthetic construct
  source 1..20: mol_type = other DNA; note = chemically synthesized
ccctaggaggttgaccaata

SEQ ID NO: 137863 - skipped

SEQ ID NO: 137864 - DNA, 20 bp, synthetic construct
  source 1..20: mol_type = other DNA; note = chemically synthesized
gccatattggtcaacctcct

SEQ ID NO: 137865-137880 - skipped (16 entries)

SEQ ID NO: 137881 - DNA, 20 bp, synthetic construct
  source 1..20: mol_type = other DNA; note = chemically synthesized
tataaaaaaaataataataa

SEQ ID NO: 137882-137887 - skipped (6 entries)

SEQ ID NO: 137888 - DNA, 20 bp, synthetic construct
  source 1..20: mol_type = other DNA; note = chemically synthesized
ttgctgagaattcccatatg

SEQ ID NO: 137889-137893 - skipped (5 entries)

SEQ ID NO: 137894 - DNA, 20 bp, synthetic construct
  source 1..20: mol_type = other DNA; note = chemically synthesized
caaagacttcatatcaagta

SEQ ID NO: 137895-137900 - skipped (6 entries)

SEQ ID NO: 137901 - DNA, 20 bp, synthetic construct
  source 1..20: mol_type = other DNA; note = chemically synthesized
cagctgaactttggcagatt

SEQ ID NO: 137902-137908 - skipped (7 entries)

SEQ ID NO: 137909 - DNA, 20 bp, synthetic construct
  source 1..20: mol_type = other DNA; note = chemically synthesized
agaatgagaagagcattata

SEQ ID NO: 137910 - DNA, 20 bp, synthetic construct
  source 1..20: mol_type = other DNA; note = chemically synthesized
gaatgagaagagcattataa

SEQ ID NO: 137911-137991 - skipped (81 entries)

SEQ ID NO: 137992 - DNA, 20 bp, synthetic construct
  source 1..20: mol_type = other DNA; note = chemically synthesized
actacaatgaagggaaacag

SEQ ID NO: 137993-138012 - skipped (20 entries)

SEQ ID NO: 138013 - DNA, 20 bp, synthetic construct
  source 1..20: mol_type = other DNA; note = chemically synthesized
ttacctcactcccgttaaaa

SEQ ID NO: 138014-138251 - skipped (238 entries)

SEQ ID NO: 138252 - DNA, 20 bp, synthetic construct
  source 1..20: mol_type = other DNA; note = chemically synthesized
cggggcctgtcaaggggtga

SEQ ID NO: 138253-138256 - skipped (4 entries)

SEQ ID NO: 138257 - DNA, 20 bp, synthetic construct
  source 1..20: mol_type = other DNA; note = chemically synthesized
gtcaaggggtgaggggcaag

SEQ ID NO: 138258-138270 - skipped (13 entries)

SEQ ID NO: 138271 - DNA, 20 bp, synthetic construct
  source 1..20: mol_type = other DNA; note = chemically synthesized
ggggcttaaaacctggatgt

SEQ ID NO: 138272 - DNA, 20 bp, synthetic construct
  source 1..20: mol_type = other DNA; note = chemically synthesized
gggcttaaaacctggatgtt

SEQ ID NO: 138273 - DNA, 20 bp, synthetic construct
  source 1..20: mol_type = other DNA; note = chemically synthesized
tactcatcaacccaacatcc

SEQ ID NO: 138274-138391 - skipped (118 entries)

SEQ ID NO: 138392 - DNA, 20 bp, synthetic construct
  source 1..20: mol_type = other DNA; note = chemically synthesized
accaaacacacaatattcca

SEQ ID NO: 138393-138436 - skipped (44 entries)

SEQ ID NO: 138437 - DNA, 20 bp, synthetic construct
  source 1..20: mol_type = other DNA; note = chemically synthesized
tacaggctcttgcctcagtg

SEQ ID NO: 138438-138495 - skipped (58 entries)

SEQ ID NO: 138496 - DNA, 20 bp, synthetic construct
  source 1..20: mol_type = other DNA; note = chemically synthesized
ttatggatgagcaaagattg

SEQ ID NO: 138497-138501 - skipped (5 entries)

SEQ ID NO: 138502 - DNA, 20 bp, synthetic construct
  source 1..20: mol_type = other DNA; note = chemically synthesized
tcatccataagcagcaactc

SEQ ID NO: 138503-138505 - skipped (3 entries)

SEQ ID NO: 138506 - DNA, 20 bp, synthetic construct
  source 1..20: mol_type = other DNA; note = chemically synthesized
atctcaaggtaaaacttcag

SEQ ID NO: 138507-138513 - skipped (7 entries)

SEQ ID NO: 138514 - DNA, 20 bp, synthetic construct
  source 1..20: mol_type = other DNA; note = chemically synthesized
gaatgagaagtggagtcaga

SEQ ID NO: 138515-138517 - skipped (3 entries)

SEQ ID NO: 138518 - DNA, 20 bp, synthetic construct
  source 1..20: mol_type = other DNA; note = chemically synthesized
atgagaaccagaatgagaag

SEQ ID NO: 138519-138568 - skipped (50 entries)

SEQ ID NO: 138569 - DNA, 20 bp, synthetic construct
  source 1..20: mol_type = other DNA; note = chemically synthesized
ggtgagtccactgatggatc

SEQ ID NO: 138570-138573 - skipped (4 entries)

SEQ ID NO: 138574 - DNA, 20 bp, synthetic construct
  source 1..20: mol_type = other DNA; note = chemically synthesized
aaggtatagctgctatattg

SEQ ID NO: 138575-138576 - skipped (2 entries)

SEQ ID NO: 138577 - DNA, 20 bp, synthetic construct
  source 1..20: mol_type = other DNA; note = chemically synthesized
ttaaatcatacatttcataa

SEQ ID NO: 138578-138603 - skipped (26 entries)

SEQ ID NO: 138604 - DNA, 20 bp, synthetic construct
  source 1..20: mol_type = other DNA; note = chemically synthesized
acatattcctcagggctctt

SEQ ID NO: 138605-138608 - skipped (4 entries)

SEQ ID NO: 138609 - DNA, 20 bp, synthetic construct
  source 1..20: mol_type = other DNA; note = chemically synthesized
tcagggctcttgggtgacca

SEQ ID NO: 138610-138647 - skipped (38 entries)

SEQ ID NO: 138648 - DNA, 20 bp, synthetic construct
  source 1..20: mol_type = other DNA; note = chemically synthesized
agcataacctgaagggccct

SEQ ID NO: 138649-138699 - skipped (51 entries)

SEQ ID NO: 138700 - DNA, 20 bp, synthetic construct
  source 1..20: mol_type = other DNA; note = chemically synthesized
actaacatctaagttaataa

SEQ ID NO: 138701-138734 - skipped (34 entries)

SEQ ID NO: 138735 - DNA, 20 bp, synthetic construct
  source 1..20: mol_type = other DNA; note = chemically synthesized
ggaagctgcagcagaaaagt

SEQ ID NO: 138736-138740 - skipped (5 entries)

SEQ ID NO: 138741 - DNA, 20 bp, synthetic construct
  source 1..20: mol_type = other DNA; note = chemically synthesized
tgtgaatgccgagagaggtg

SEQ ID NO: 138742-138764 - skipped (23 entries)

SEQ ID NO: 138765 - DNA, 20 bp, synthetic construct
  source 1..20: mol_type = other DNA; note = chemically synthesized
tgtcttagtggtctggatag

SEQ ID NO: 138766-138779 - skipped (14 entries)

SEQ ID NO: 138780 - DNA, 20 bp, synthetic construct
  source 1..20: mol_type = other DNA; note = chemically synthesized
agtgctactctgttgaacac

SEQ ID NO: 138781-138818 - skipped (38 entries)

SEQ ID NO: 138819 - DNA, 20 bp, synthetic construct
  source 1..20: mol_type = other DNA; note = chemically synthesized
caatgtcctctaagtgttca

SEQ ID NO: 138820-138843 - skipped (24 entries)

SEQ ID NO: 138844 - DNA, 20 bp, synthetic construct
  source 1..20: mol_type = other DNA; note = chemically synthesized
tcatctctcttcctctcctt

SEQ ID NO: 138845-138850 - skipped (6 entries)

SEQ ID NO: 138851 - DNA, 20 bp, synthetic construct
  source 1..20: mol_type = other DNA; note = chemically synthesized
aaggagaggaagagagatga

SEQ ID NO: 138852-138853 - skipped (2 entries)

SEQ ID NO: 138854 - DNA, 20 bp, synthetic construct
  source 1..20: mol_type = other DNA; note = chemically synthesized
atgagggaatggctgatcag

SEQ ID NO: 138855-138906 - skipped (52 entries)

SEQ ID NO: 138907 - DNA, 20 bp, synthetic construct
  source 1..20: mol_type = other DNA; note = chemically synthesized
aagcctaggaaacaccactc

SEQ ID NO: 138908-138912 - skipped (5 entries)

SEQ ID NO: 138913 - DNA, 20 bp, synthetic construct
  source 1..20: mol_type = other DNA; note = chemically synthesized
ccactctggacatcagactt

SEQ ID NO: 138914-138972 - skipped (59 entries)

SEQ ID NO: 138973 - DNA, 20 bp, synthetic construct
  source 1..20: mol_type = other DNA; note = chemically synthesized
ccagtatgaatggtgtgaga

SEQ ID NO: 138974-139064 - skipped (91 entries)

SEQ ID NO: 139065 - DNA, 20 bp, synthetic construct
  source 1..20: mol_type = other DNA; note = chemically synthesized
tagctccacatgagaacacg

SEQ ID NO: 139066-139078 - skipped (13 entries)

SEQ ID NO: 139079 - DNA, 20 bp, synthetic construct
  source 1..20: mol_type = other DNA; note = chemically synthesized
gaaacggaggactactagag

SEQ ID NO: 139080-139103 - skipped (24 entries)

SEQ ID NO: 139104 - DNA, 20 bp, synthetic construct
  source 1..20: mol_type = other DNA; note = chemically synthesized
atcatttgtactccaaacct

SEQ ID NO: 139105 - skipped

SEQ ID NO: 139106 - DNA, 20 bp, synthetic construct
  source 1..20: mol_type = other DNA; note = chemically synthesized
tattacatgatgccgaggtt

SEQ ID NO: 139107-139153 - skipped (47 entries)

SEQ ID NO: 139154 - DNA, 20 bp, synthetic construct
  source 1..20: mol_type = other DNA; note = chemically synthesized
gctgcatgggaggctgacac

SEQ ID NO: 139155-139162 - skipped (8 entries)

SEQ ID NO: 139163 - DNA, 20 bp, synthetic construct
  source 1..20: mol_type = other DNA; note = chemically synthesized
cagcctcccatgcagctggc

SEQ ID NO: 139164 - DNA, 20 bp, synthetic construct
  source 1..20: mol_type = other DNA; note = chemically synthesized
agcctcccatgcagctggca

SEQ ID NO: 139165-139235 - skipped (71 entries)

SEQ ID NO: 139236 - DNA, 20 bp, synthetic construct
  source 1..20: mol_type = other DNA; note = chemically synthesized
ctgcattgagcaagtccgtc

SEQ ID NO: 139237-139255 - skipped (19 entries)

SEQ ID NO: 139256 - DNA, 20 bp, synthetic construct
  source 1..20: mol_type = other DNA; note = chemically synthesized
aattaatactgaaaaaattg

SEQ ID NO: 139257-139274 - skipped (18 entries)

SEQ ID NO: 139275 - DNA, 20 bp, synthetic construct
  source 1..20: mol_type = other DNA; note = chemically synthesized
tgtatagattcctctgaata

SEQ ID NO: 139276-139284 - skipped (9 entries)

SEQ ID NO: 139285 - DNA, 20 bp, synthetic construct
  source 1..20: mol_type = other DNA; note = chemically synthesized
ttgtaatttatcttctgctt

SEQ ID NO: 139286-139289 - skipped (4 entries)

SEQ ID NO: 139290 - DNA, 20 bp, synthetic construct
  source 1..20: mol_type = other DNA; note = chemically synthesized
agtgaaatgtaactatttga

SEQ ID NO: 139291-139293 - skipped (3 entries)

SEQ ID NO: 139294 - DNA, 20 bp, synthetic construct
  source 1..20: mol_type = other DNA; note = chemically synthesized
aattaggaggagtatgtacc

SEQ ID NO: 139295-139329 - skipped (35 entries)

SEQ ID NO: 139330 - DNA, 20 bp, synthetic construct
  source 1..20: mol_type = other DNA; note = chemically synthesized
acagtagggaatgtgcctca

SEQ ID NO: 139331-139345 - skipped (15 entries)

SEQ ID NO: 139346 - DNA, 20 bp, synthetic construct
  source 1..20: mol_type = other DNA; note = chemically synthesized
aactttcaatgcagttgggg

SEQ ID NO: 139347-139352 - skipped (6 entries)

SEQ ID NO: 139353 - DNA, 20 bp, synthetic construct
  source 1..20: mol_type = other DNA; note = chemically synthesized
ctgcgtgtgcgagcatgcat

SEQ ID NO: 139354-139369 - skipped (16 entries)

SEQ ID NO: 139370 - DNA, 20 bp, synthetic construct
  source 1..20: mol_type = other DNA; note = chemically synthesized
ccatctctcagaatcccatt

SEQ ID NO: 139371-139382 - skipped (12 entries)

SEQ ID NO: 139383 - DNA, 20 bp, synthetic construct
  source 1..20: mol_type = other DNA; note = chemically synthesized
tttatatgggaccaggttca

SEQ ID NO: 139384 - DNA, 20 bp, synthetic construct
  source 1..20: mol_type = other DNA; note = chemically synthesized
tatggcaccttccctgaacc

SEQ ID NO: 139385-139388 - skipped (4 entries)

SEQ ID NO: 139389 - DNA, 20 bp, synthetic construct
  source 1..20: mol_type = other DNA; note = chemically synthesized
gttcagggaaggtgccatag

SEQ ID NO: 139390-139394 - skipped (5 entries)

SEQ ID NO: 139395 - DNA, 20 bp, synthetic construct
  source 1..20: mol_type = other DNA; note = chemically synthesized
caacatgaactgtaacttag

SEQ ID NO: 139396-139424 - skipped (29 entries)

SEQ ID NO: 139425 - DNA, 20 bp, synthetic construct
  source 1..20: mol_type = other DNA; note = chemically synthesized
cagagtggttgagaaagagt

SEQ ID NO: 139426-139433 - skipped (8 entries)

SEQ ID NO: 139434 - DNA, 20 bp, synthetic construct
  source 1..20: mol_type = other DNA; note = chemically synthesized
attagttagcagaattacga

SEQ ID NO: 139435-139439 - skipped (5 entries)

SEQ ID NO: 139440 - DNA, 20 bp, synthetic construct
  source 1..20: mol_type = other DNA; note = chemically synthesized
ggctgtgatcaagttgagaa

SEQ ID NO: 139441-139442 - skipped (2 entries)

SEQ ID NO: 139443 - DNA, 20 bp, synthetic construct
  source 1..20: mol_type = other DNA; note = chemically synthesized
tcaagttgagaagggaagct

SEQ ID NO: 139444-139448 - skipped (5 entries)

SEQ ID NO: 139449 - DNA, 20 bp, synthetic construct
  source 1..20: mol_type = other DNA; note = chemically synthesized
tgttctgagccctcacattc

SEQ ID NO: 139450 - DNA, 20 bp, synthetic construct
  source 1..20: mol_type = other DNA; note = chemically synthesized
aagctggggccagaatgtga

SEQ ID NO: 139451-139455 - skipped (5 entries)

SEQ ID NO: 139456 - DNA, 20 bp, synthetic construct
  source 1..20: mol_type = other DNA; note = chemically synthesized
gaacactagatgcccaaata

SEQ ID NO: 139457-139460 - skipped (4 entries)

SEQ ID NO: 139461 - DNA, 20 bp, synthetic construct
  source 1..20: mol_type = other DNA; note = chemically synthesized
ggacatcatgttgaaggcca

SEQ ID NO: 139462 - DNA, 20 bp, synthetic construct
  source 1..20: mol_type = other DNA; note = chemically synthesized
gacatcatgttgaaggccat

SEQ ID NO: 139463-139472 - skipped (10 entries)

SEQ ID NO: 139473 - DNA, 20 bp, synthetic construct
  source 1..20: mol_type = other DNA; note = chemically synthesized
gaagaatgccacaataaaag

SEQ ID NO: 139474-139481 - skipped (8 entries)

SEQ ID NO: 139482 - DNA, 20 bp, synthetic construct
  source 1..20: mol_type = other DNA; note = chemically synthesized
ttttccatttctttcttgga

SEQ ID NO: 139483-139489 - skipped (7 entries)

SEQ ID NO: 139490 - DNA, 20 bp, synthetic construct
  source 1..20: mol_type = other DNA; note = chemically synthesized
gagatacaagaggcttttct

SEQ ID NO: 139491-139510 - skipped (20 entries)

SEQ ID NO: 139511 - DNA, 20 bp, synthetic construct
  source 1..20: mol_type = other DNA; note = chemically synthesized
gacagtttttacaagcaatg

SEQ ID NO: 139512-139537 - skipped (26 entries)

SEQ ID NO: 139538 - DNA, 20 bp, synthetic construct
  source 1..20: mol_type = other DNA; note = chemically synthesized
ttcttacattcctactctaa

SEQ ID NO: 139539-139579 - skipped (41 entries)

SEQ ID NO: 139580 - DNA, 20 bp, synthetic construct
  source 1..20: mol_type = other DNA; note = chemically synthesized
caggtagtactcctatttct

SEQ ID NO: 139581 - DNA, 20 bp, synthetic construct
  source 1..20: mol_type = other DNA; note = chemically synthesized
agtactcctttcctagaaat

SEQ ID NO: 139582-139612 - skipped (31 entries)

SEQ ID NO: 139613 - DNA, 20 bp, synthetic construct
  source 1..20: mol_type = other DNA; note = chemically synthesized
ctacaggtagtatcagcgaa

SEQ ID NO: 139614-139632 - skipped (19 entries)

SEQ ID NO: 139633 - DNA, 20 bp, synthetic construct
  source 1..20: mol_type = other DNA; note = chemically synthesized
gacagcagaagagggttagg

SEQ ID NO: 139634 - DNA, 20 bp, synthetic construct
  source 1..20: mol_type = other DNA; note = chemically synthesized
agacagcagaagagggttag

SEQ ID NO: 139635 - DNA, 20 bp, synthetic construct
  source 1..20: mol_type = other DNA; note = chemically synthesized
aagacagcagaagagggtta

SEQ ID NO: 139636-139638 - skipped (3 entries)

SEQ ID NO: 139639 - DNA, 20 bp, synthetic construct
  source 1..20: mol_type = other DNA; note = chemically synthesized
ccatgtgaagacagcagaag

SEQ ID NO: 139640-139643 - skipped (4 entries)

SEQ ID NO: 139644 - DNA, 20 bp, synthetic construct
  source 1..20: mol_type = other DNA; note = chemically synthesized
cctcttctgctgtcttcaca

SEQ ID NO: 139645-139671 - skipped (27 entries)

SEQ ID NO: 139672 - DNA, 20 bp, synthetic construct
  source 1..20: mol_type = other DNA; note = chemically synthesized
tataagaattcaaatacctt

SEQ ID NO: 139673-139726 - skipped (54 entries)

SEQ ID NO: 139727 - DNA, 20 bp, synthetic construct
  source 1..20: mol_type = other DNA; note = chemically synthesized
aacatccgaatggagaagag

SEQ ID NO: 139728-139731 - skipped (4 entries)

SEQ ID NO: 139732 - DNA, 20 bp, synthetic construct
  source 1..20: mol_type = other DNA; note = chemically synthesized
aatggtgtaatggttacctt

SEQ ID NO: 139733 - DNA, 20 bp, synthetic construct
  source 1..20: mol_type = other DNA; note = chemically synthesized
ccccttatatgtacgtccaa

SEQ ID NO: 139734-139751 - skipped (18 entries)

SEQ ID NO: 139752 - DNA, 20 bp, synthetic construct
  source 1..20: mol_type = other DNA; note = chemically synthesized
cattttctcagcagttgtct

SEQ ID NO: 139753-139777 - skipped (25 entries)

SEQ ID NO: 139778 - DNA, 20 bp, synthetic construct
  source 1..20: mol_type = other DNA; note = chemically synthesized
catttgtgaagatcatttct

SEQ ID NO: 139779-139791 - skipped (13 entries)

SEQ ID NO: 139792 - DNA, 20 bp, synthetic construct
  source 1..20: mol_type = other DNA; note = chemically synthesized
cttgcagtgaagtgttgctg

SEQ ID NO: 139793 - DNA, 20 bp, synthetic construct
  source 1..20: mol_type = other DNA; note = chemically synthesized
ttgcagtgaagtgttgctgg

SEQ ID NO: 139794-139831 - skipped (38 entries)

SEQ ID NO: 139832 - DNA, 20 bp, synthetic construct
  source 1..20: mol_type = other DNA; note = chemically synthesized
aaaggccactgtgctcctat

SEQ ID NO: 139833-139845 - skipped (13 entries)

SEQ ID NO: 139846 - DNA, 20 bp, synthetic construct
  source 1..20: mol_type = other DNA; note = chemically synthesized
tacagtatgacagcttttaa

SEQ ID NO: 139847-139859 - skipped (13 entries)

SEQ ID NO: 139860 - DNA, 20 bp, synthetic construct
  source 1..20: mol_type = other DNA; note = chemically synthesized
gacatacttgtctattccct

SEQ ID NO: 139861-139867 - skipped (7 entries)

SEQ ID NO: 139868 - DNA, 20 bp, synthetic construct
  source 1..20: mol_type = other DNA; note = chemically synthesized
taattcttatcatataaaaa

SEQ ID NO: 139869-139871 - skipped (3 entries)

SEQ ID NO: 139872 - DNA, 20 bp, synthetic construct
  source 1..20: mol_type = other DNA; note = chemically synthesized
aatgggtctacattagcaca

SEQ ID NO: 139873-139878 - skipped (6 entries)

SEQ ID NO: 139879 - DNA, 20 bp, synthetic construct
  source 1..20: mol_type = other DNA; note = chemically synthesized
cacttgcactgcggcatgaa

SEQ ID NO: 139880-139887 - skipped (8 entries)

SEQ ID NO: 139888 - DNA, 20 bp, synthetic construct
  source 1..20: mol_type = other DNA; note = chemically synthesized
gaaaggagcccagcttgagg

SEQ ID NO: 139889-139906 - skipped (18 entries)

SEQ ID NO: 139907 - DNA, 20 bp, synthetic construct
  source 1..20: mol_type = other DNA; note = chemically synthesized
aactttatgtactgtttgat

SEQ ID NO: 139908-139927 - skipped (20 entries)

SEQ ID NO: 139928 - DNA, 20 bp, synthetic construct
  source 1..20: mol_type = other DNA; note = chemically synthesized
ataatgtaaacagctcggtt

SEQ ID NO: 139929-139993 - skipped (65 entries)

SEQ ID NO: 139994 - DNA, 20 bp, synthetic construct
  source 1..20: mol_type = other DNA; note = chemically synthesized
aatatagcagaaagagacaa

SEQ ID NO: 139995-140010 - skipped (16 entries)

SEQ ID NO: 140011 - DNA, 20 bp, synthetic construct
  source 1..20: mol_type = other DNA; note = chemically synthesized
agacagaataggtgttactg

SEQ ID NO: 140012-140063 - skipped (52 entries)

SEQ ID NO: 140064 - DNA, 20 bp, synthetic construct
  source 1..20: mol_type = other DNA; note = chemically synthesized
gatatttattaaggccaaac

SEQ ID NO: 140065-140070 - skipped (6 entries)

SEQ ID NO: 140071 - DNA, 20 bp, synthetic construct
  source 1..20: mol_type = other DNA; note = chemically synthesized
cataaatggatagatattag

SEQ ID NO: 140072-140098 - skipped (27 entries)

SEQ ID NO: 140099 - DNA, 20 bp, synthetic construct
  source 1..20: mol_type = other DNA; note = chemically synthesized
tgtagtaattgctacgctgt

SEQ ID NO: 140100-140112 - skipped (13 entries)

SEQ ID NO: 140113 - DNA, 20 bp, synthetic construct
  source 1..20: mol_type = other DNA; note = chemically synthesized
gctagatattgcacatggga

SEQ ID NO: 140114-140127 - skipped (14 entries)

SEQ ID NO: 140128 - DNA, 20 bp, synthetic construct
  source 1..20: mol_type = other DNA; note = chemically synthesized
gtaagtacagaaccattgag

SEQ ID NO: 140129 - DNA, 20 bp, synthetic construct
  source 1..20: mol_type = other DNA; note = chemically synthesized
tgtaagtacagaaccattga

SEQ ID NO: 140130-140156 - skipped (27 entries)

SEQ ID NO: 140157 - DNA, 20 bp, synthetic construct
  source 1..20: mol_type = other DNA; note = chemically synthesized
acactggaaaaggaggatat

SEQ ID NO: 140158 - DNA, 20 bp, synthetic construct
  source 1..20: mol_type = other DNA; note = chemically synthesized
aacactggaaaaggaggata

SEQ ID NO: 140159-140723 - skipped (565 entries)

SEQ ID NO: 140724 - DNA, 20 bp, synthetic construct
  source 1..20: mol_type = other DNA; note = chemically synthesized
taaggaataagtgttagaat

SEQ ID NO: 140725-140740 - skipped (16 entries)

SEQ ID NO: 140741 - DNA, 20 bp, synthetic construct
  source 1..20: mol_type = other DNA; note = chemically synthesized
caaggaagtgttgatggatt

SEQ ID NO: 140742-140763 - skipped (22 entries)

SEQ ID NO: 140764 - DNA, 20 bp, synthetic construct
  source 1..20: mol_type = other DNA; note = chemically synthesized
aatgaagttagagaaagatg

SEQ ID NO: 140765-140795 - skipped (31 entries)

SEQ ID NO: 140796 - DNA, 20 bp, synthetic construct
  source 1..20: mol_type = other DNA; note = chemically synthesized
caaggaataaaagtggggtc

SEQ ID NO: 140797-140838 - skipped (42 entries)

SEQ ID NO: 140839 - DNA, 20 bp, synthetic construct
  source 1..20: mol_type = other DNA; note = chemically synthesized
acaagctagaaacaatgtgt

SEQ ID NO: 140840-140843 - skipped (4 entries)

SEQ ID NO: 140844 - DNA, 20 bp, synthetic construct
  source 1..20: mol_type = other DNA; note = chemically synthesized
cagagcttgcattccctcta

SEQ ID NO: 140845 - DNA, 20 bp, synthetic construct
  source 1..20: mol_type = other DNA; note = chemically synthesized
agagcttgcattccctctaa

SEQ ID NO: 140846 - DNA, 20 bp, synthetic construct
  source 1..20: mol_type = other DNA; note = chemically synthesized
cctcccctacatcccttaga

SEQ ID NO: 140847-140858 - skipped (12 entries)

SEQ ID NO: 140859 - DNA, 20 bp, synthetic construct
  source 1..20: mol_type = other DNA; note = chemically synthesized
caggctctaaaagctggaaa

SEQ ID NO: 140860-140862 - skipped (3 entries)

SEQ ID NO: 140863 - DNA, 20 bp, synthetic construct
  source 1..20: mol_type = other DNA; note = chemically synthesized
tgcaggcaggctctaaaagc

SEQ ID NO: 140864-140866 - skipped (3 entries)

SEQ ID NO: 140867 - DNA, 20 bp, synthetic construct
  source 1..20: mol_type = other DNA; note = chemically synthesized
ggccaagagccaagaaatgc

SEQ ID NO: 140868-140869 - skipped (2 entries)

SEQ ID NO: 140870 - DNA, 20 bp, synthetic construct
  source 1..20: mol_type = other DNA; note = chemically synthesized
tgcctgcatttcttggctct

SEQ ID NO: 140871-140873 - skipped (3 entries)

SEQ ID NO: 140874 - DNA, 20 bp, synthetic construct
  source 1..20: mol_type = other DNA; note = chemically synthesized
ggcattgaagatgaaggaca

SEQ ID NO: 140875 - DNA, 20 bp, synthetic construct
  source 1..20: mol_type = other DNA; note = chemically synthesized
tggcattgaagatgaaggac

SEQ ID NO: 140876-140882 - skipped (7 entries)

SEQ ID NO: 140883 - DNA, 20 bp, synthetic construct
  source 1..20: mol_type = other DNA; note = chemically synthesized
attggaagatgctacactac

SEQ ID NO: 140884-140894 - skipped (11 entries)

SEQ ID NO: 140895 - DNA, 20 bp, synthetic construct
  source 1..20: mol_type = other DNA; note = chemically synthesized
aagagtcctcctaagagaga

SEQ ID NO: 140896-140898 - skipped (3 entries)

SEQ ID NO: 140899 - DNA, 20 bp, synthetic construct
  source 1..20: mol_type = other DNA; note = chemically synthesized
tcacctccttctctcttagg

SEQ ID NO: 140900-140908 - skipped (9 entries)

SEQ ID NO: 140909 - DNA, 20 bp, synthetic construct
  source 1..20: mol_type = other DNA; note = chemically synthesized
tgattacattgggcgcactg

SEQ ID NO: 140910-140913 - skipped (4 entries)

SEQ ID NO: 140914 - DNA, 20 bp, synthetic construct
  source 1..20: mol_type = other DNA; note = chemically synthesized
cttgacacggagagatagcc

SEQ ID NO: 140915-140941 - skipped (27 entries)

SEQ ID NO: 140942 - DNA, 20 bp, synthetic construct
  source 1..20: mol_type = other DNA; note = chemically synthesized
gatatggacatctttggcgg

SEQ ID NO: 140943-140958 - skipped (16 entries)

SEQ ID NO: 140959 - DNA, 20 bp, synthetic construct
  source 1..20: mol_type = other DNA; note = chemically synthesized
gacatactgacatacttctt

SEQ ID NO: 140960 - skipped

SEQ ID NO: 140961 - DNA, 20 bp, synthetic construct
  source 1..20: mol_type = other DNA; note = chemically synthesized
tactgacatacttcttcggg

SEQ ID NO: 140962-140964 - skipped (3 entries)

SEQ ID NO: 140965 - DNA, 20 bp, synthetic construct
  source 1..20: mol_type = other DNA; note = chemically synthesized
catacttcttcgggtgggtt

SEQ ID NO: 140966-140986 - skipped (21 entries)

SEQ ID NO: 140987 - DNA, 20 bp, synthetic construct
  source 1..20: mol_type = other DNA; note = chemically synthesized
accaggctcctgtgtccttg

SEQ ID NO: 140988-140990 - skipped (3 entries)

SEQ ID NO: 140991 - DNA, 20 bp, synthetic construct
  source 1..20: mol_type = other DNA; note = chemically synthesized
ctgtgtccttgtggcagaca

SEQ ID NO: 140992 - skipped

SEQ ID NO: 140993 - DNA, 20 bp, synthetic construct
  source 1..20: mol_type = other DNA; note = chemically synthesized
ggcagacatggtttaaccaa

SEQ ID NO: 140994-140996 - skipped (3 entries)

SEQ ID NO: 140997 - DNA, 20 bp, synthetic construct
  source 1..20: mol_type = other DNA; note = chemically synthesized
taaccaaaggcctccggaag

SEQ ID NO: 140998-141002 - skipped (5 entries)

SEQ ID NO: 141003 - DNA, 20 bp, synthetic construct
  source 1..20: mol_type = other DNA; note = chemically synthesized
aaggcctccggaagtgggaa

SEQ ID NO: 141004 - skipped

SEQ ID NO: 141005 - DNA, 20 bp, synthetic construct
  source 1..20: mol_type = other DNA; note = chemically synthesized
agtgggaaaggtgtattgtt

SEQ ID NO: 141006-141014 - skipped (9 entries)

SEQ ID NO: 141015 - DNA, 20 bp, synthetic construct
  source 1..20: mol_type = other DNA; note = chemically synthesized
ccaaaagaccatttgaattg

SEQ ID NO: 141016-141057 - skipped (42 entries)

SEQ ID NO: 141058 - DNA, 20 bp, synthetic construct
  source 1..20: mol_type = other DNA; note = chemically synthesized
gaaggctgcaggaaaggcta

SEQ ID NO: 141059-141080 - skipped (22 entries)

SEQ ID NO: 141081 - DNA, 20 bp, synthetic construct
  source 1..20: mol_type = other DNA; note = chemically synthesized
atgtttatgagtgggtgtgg

SEQ ID NO: 141082-141088 - skipped (7 entries)

SEQ ID NO: 141089 - DNA, 20 bp, synthetic construct
  source 1..20: mol_type = other DNA; note = chemically synthesized
gaggaagacagctgggaaga

SEQ ID NO: 141090-141117 - skipped (28 entries)

SEQ ID NO: 141118 - DNA, 20 bp, synthetic construct
  source 1..20: mol_type = other DNA; note = chemically synthesized
cttctattgttaccatggag

SEQ ID NO: 141119-141130 - skipped (12 entries)

SEQ ID NO: 141131 - DNA, 20 bp, synthetic construct
  source 1..20: mol_type = other DNA; note = chemically synthesized
agtaaaggaggtggtgcaga

SEQ ID NO: 141132-141133 - skipped (2 entries)

SEQ ID NO: 141134 - DNA, 20 bp, synthetic construct
  source 1..20: mol_type = other DNA; note = chemically synthesized
aggaggtggtgcagagggag

SEQ ID NO: 141135 - DNA, 20 bp, synthetic construct
  source 1..20: mol_type = other DNA; note = chemically synthesized
ggaggtggtgcagagggaga

SEQ ID NO: 141136-141149 - skipped (14 entries)

SEQ ID NO: 141150 - DNA, 20 bp, synthetic construct
  source 1..20: mol_type = other DNA; note = chemically synthesized
aaaacaacaggaacacacag

SEQ ID NO: 141151 - DNA, 20 bp, synthetic construct
  source 1..20: mol_type = other DNA; note = chemically synthesized
aaacaacaggaacacacagt

SEQ ID NO: 141152-141155 - skipped (4 entries)

SEQ ID NO: 141156 - DNA, 20 bp, synthetic construct
  source 1..20: mol_type = other DNA; note = chemically synthesized
tgggtggcaaattcagccca

SEQ ID NO: 141157 - skipped

SEQ ID NO: 141158 - DNA, 20 bp, synthetic construct
  source 1..20: mol_type = other DNA; note = chemically synthesized
tactgattcattcacatccc

SEQ ID NO: 141159-141160 - skipped (2 entries)

SEQ ID NO: 141161 - DNA, 20 bp, synthetic construct
  source 1..20: mol_type = other DNA; note = chemically synthesized
agggatgtgaatgaatcagt

SEQ ID NO: 141162-141176 - skipped (15 entries)

SEQ ID NO: 141177 - DNA, 20 bp, synthetic construct
  source 1..20: mol_type = other DNA; note = chemically synthesized
ttttctgttttaggattgag

SEQ ID NO: 141178 - DNA, 20 bp, synthetic construct
  source 1..20: mol_type = other DNA; note = chemically synthesized
cttttctgttttaggattga

SEQ ID NO: 141179-141195 - skipped (17 entries)

SEQ ID NO: 141196 - DNA, 20 bp, synthetic construct
  source 1..20: mol_type = other DNA; note = chemically synthesized
caggtaaatgaccttcagaa

SEQ ID NO: 141197 - DNA, 20 bp, synthetic construct
  source 1..20: mol_type = other DNA; note = chemically synthesized
tccatctactgccattctga

SEQ ID NO: 141198-141316 - skipped (119 entries)

SEQ ID NO: 141317 - DNA, 20 bp, synthetic construct
  source 1..20: mol_type = other DNA; note = chemically synthesized
tacaagtgaagtctatggca

SEQ ID NO: 141318-141447 - skipped (130 entries)

SEQ ID NO: 141448 - DNA, 20 bp, synthetic construct
  source 1..20: mol_type = other DNA; note = chemically synthesized
ctggcttgtatgggggtaat

SEQ ID NO: 141449-141450 - skipped (2 entries)

SEQ ID NO: 141451 - DNA, 20 bp, synthetic construct
  source 1..20: mol_type = other DNA; note = chemically synthesized
catctccctggcttgtatgg

SEQ ID NO: 141452 - DNA, 20 bp, synthetic construct
  source 1..20: mol_type = other DNA; note = chemically synthesized
acatctccctggcttgtatg

SEQ ID NO: 141453 - DNA, 20 bp, synthetic construct
  source 1..20: mol_type = other DNA; note = chemically synthesized
tacatctccctggcttgtat

SEQ ID NO: 141454 - skipped

SEQ ID NO: 141455 - DNA, 20 bp, synthetic construct
  source 1..20: mol_type = other DNA; note = chemically synthesized
gtacatctccctggcttgta

SEQ ID NO: 141456-141464 - skipped (9 entries)

SEQ ID NO: 141465 - DNA, 20 bp, synthetic construct
  source 1..20: mol_type = other DNA; note = chemically synthesized
tctttgtatatattgcaaag

SEQ ID NO: 141466-141469 - skipped (4 entries)

SEQ ID NO: 141470 - DNA, 20 bp, synthetic construct
  source 1..20: mol_type = other DNA; note = chemically synthesized
tacaaagaaatttttagttg

SEQ ID NO: 141471-141506 - skipped (36 entries)

SEQ ID NO: 141507 - DNA, 20 bp, synthetic construct
  source 1..20: mol_type = other DNA; note = chemically synthesized
aatcagaaaggccagtctcc

SEQ ID NO: 141508 - DNA, 20 bp, synthetic construct
  source 1..20: mol_type = other DNA; note = chemically synthesized
atcagaaaggccagtctcct

SEQ ID NO: 141509 - DNA, 20 bp, synthetic construct
  source 1..20: mol_type = other DNA; note = chemically synthesized
tagaacccaccccaggagac

SEQ ID NO: 141510 - DNA, 20 bp, synthetic construct
  source 1..20: mol_type = other DNA; note = chemically synthesized
tcagaaaggccagtctcctg

SEQ ID NO: 141511 - DNA, 20 bp, synthetic construct
  source 1..20: mol_type = other DNA; note = chemically synthesized
gaaaggccagtctcctgggg

SEQ ID NO: 141512 - DNA, 20 bp, synthetic construct
  source 1..20: mol_type = other DNA; note = chemically synthesized
aaaggccagtctcctggggt

SEQ ID NO: 141513-141544 - skipped (32 entries)

SEQ ID NO: 141545 - DNA, 20 bp, synthetic construct
  source 1..20: mol_type = other DNA; note = chemically synthesized
ttcctcatctctagcttgct

SEQ ID NO: 141546-141551 - skipped (6 entries)

SEQ ID NO: 141552 - DNA, 20 bp, synthetic construct
  source 1..20: mol_type = other DNA; note = chemically synthesized
ggcaccattccaaagaatac

SEQ ID NO: 141553 - DNA, 20 bp, synthetic construct
  source 1..20: mol_type = other DNA; note = chemically synthesized
gttatggaacctgtattctt

SEQ ID NO: 141554-141570 - skipped (17 entries)

SEQ ID NO: 141571 - DNA, 20 bp, synthetic construct
  source 1..20: mol_type = other DNA; note = chemically synthesized
gttgtctgatgccttctcta

SEQ ID NO: 141572 - DNA, 20 bp, synthetic construct
  source 1..20: mol_type = other DNA; note = chemically synthesized
gatgcagttaaccttagaga

SEQ ID NO: 141573-141579 - skipped (7 entries)

SEQ ID NO: 141580 - DNA, 20 bp, synthetic construct
  source 1..20: mol_type = other DNA; note = chemically synthesized
gagaatattccagaatctag

SEQ ID NO: 141581-141587 - skipped (7 entries)

SEQ ID NO: 141588 - DNA, 20 bp, synthetic construct
  source 1..20: mol_type = other DNA; note = chemically synthesized
ccgtataaaaggttcaatca

SEQ ID NO: 141589-141598 - skipped (10 entries)

SEQ ID NO: 141599 - DNA, 20 bp, synthetic construct
  source 1..20: mol_type = other DNA; note = chemically synthesized
atgacaacacctgagagtga

SEQ ID NO: 141600 - skipped

SEQ ID NO: 141601 - DNA, 20 bp, synthetic construct
  source 1..20: mol_type = other DNA; note = chemically synthesized
aacacctgagagtgagggta

SEQ ID NO: 141602 - DNA, 20 bp, synthetic construct
  source 1..20: mol_type = other DNA; note = chemically synthesized
acacctgagagtgagggtat

SEQ ID NO: 141603-141631 - skipped (29 entries)

SEQ ID NO: 141632 - DNA, 20 bp, synthetic construct
  source 1..20: mol_type = other DNA; note = chemically synthesized
ttaaaataacctccactata

SEQ ID NO: 141633-141710 - skipped (78 entries)

SEQ ID NO: 141711 - DNA, 20 bp, synthetic construct
  source 1..20: mol_type = other DNA; note = chemically synthesized
cagtctcgtatctgaacccc

SEQ ID NO: 141712-141718 - skipped (7 entries)

SEQ ID NO: 141719 - DNA, 20 bp, synthetic construct
  source 1..20: mol_type = other DNA; note = chemically synthesized
gatcattgcctcccaccctc

SEQ ID NO: 141720 - skipped

SEQ ID NO: 141721 - DNA, 20 bp, synthetic construct
  source 1..20: mol_type = other DNA; note = chemically synthesized
cagatgagcccccagagggt

SEQ ID NO: 141722-141723 - skipped (2 entries)

SEQ ID NO: 141724 - DNA, 20 bp, synthetic construct
  source 1..20: mol_type = other DNA; note = chemically synthesized
cattgcctcccaccctctgg

SEQ ID NO: 141725 - DNA, 20 bp, synthetic construct
  source 1..20: mol_type = other DNA; note = chemically synthesized
agctcagatgagcccccaga

SEQ ID NO: 141726 - DNA, 20 bp, synthetic construct
  source 1..20: mol_type = other DNA; note = chemically synthesized
cagctcagatgagcccccag

SEQ ID NO: 141727-141732 - skipped (6 entries)

SEQ ID NO: 141733 - DNA, 20 bp, synthetic construct
  source 1..20: mol_type = other DNA; note = chemically synthesized
tgtcagagaggagaatattt

SEQ ID NO: 141734-141752 - skipped (19 entries)

SEQ ID NO: 141753 - DNA, 20 bp, synthetic construct
  source 1..20: mol_type = other DNA; note = chemically synthesized
ttctctattatttcttccct

SEQ ID NO: 141754 - skipped

SEQ ID NO: 141755 - DNA, 20 bp, synthetic construct
  source 1..20: mol_type = other DNA; note = chemically synthesized
tctgtgaaaatagataccca

SEQ ID NO: 141756-141788 - skipped (33 entries)

SEQ ID NO: 141789 - DNA, 20 bp, synthetic construct
  source 1..20: mol_type = other DNA; note = chemically synthesized
tagaatctggcacttatcaa

SEQ ID NO: 141790-141791 - skipped (2 entries)

SEQ ID NO: 141792 - DNA, 20 bp, synthetic construct
  source 1..20: mol_type = other DNA; note = chemically synthesized
cttatcaatggcattgcctt

SEQ ID NO: 141793-141797 - skipped (5 entries)

SEQ ID NO: 141798 - DNA, 20 bp, synthetic construct
  source 1..20: mol_type = other DNA; note = chemically synthesized
tgaaagggagaaactcagag

SEQ ID NO: 141799-141803 - skipped (5 entries)

SEQ ID NO: 141804 - DNA, 20 bp, synthetic construct
  source 1..20: mol_type = other DNA; note = chemically synthesized
ggcgtttttcttgttttgaa

SEQ ID NO: 141805-141808 - skipped (4 entries)

SEQ ID NO: 141809 - DNA, 20 bp, synthetic construct
  source 1..20: mol_type = other DNA; note = chemically synthesized
caaaagtggtacaagctaac

SEQ ID NO: 141810-141824 - skipped (15 entries)

SEQ ID NO: 141825 - DNA, 20 bp, synthetic construct
  source 1..20: mol_type = other DNA; note = chemically synthesized
ggtaagcatcatgaatttta

SEQ ID NO: 141826-141921 - skipped (96 entries)

SEQ ID NO: 141922 - DNA, 20 bp, synthetic construct
  source 1..20: mol_type = other DNA; note = chemically synthesized
tcatttccaaaggggaatct

SEQ ID NO: 141923-141934 - skipped (12 entries)

SEQ ID NO: 141935 - DNA, 20 bp, synthetic construct
  source 1..20: mol_type = other DNA; note = chemically synthesized
agcagcactcctagcagctg

SEQ ID NO: 141936 - skipped

SEQ ID NO: 141937 - DNA, 20 bp, synthetic construct
  source 1..20: mol_type = other DNA; note = chemically synthesized
cagcagcactcctagcagct

SEQ ID NO: 141938-141941 - skipped (4 entries)

SEQ ID NO: 141942 - DNA, 20 bp, synthetic construct
  source 1..20: mol_type = other DNA; note = chemically synthesized
ccagctgctaggagtgctgc

SEQ ID NO: 141943-141952 - skipped (10 entries)

SEQ ID NO: 141953 - DNA, 20 bp, synthetic construct
  source 1..20: mol_type = other DNA; note = chemically synthesized
agcggcccagactaagacaa

SEQ ID NO: 141954 - DNA, 20 bp, synthetic construct
  source 1..20: mol_type = other DNA; note = chemically synthesized
tagcggcccagactaagaca

SEQ ID NO: 141955-141992 - skipped (38 entries)

SEQ ID NO: 141993 - DNA, 20 bp, synthetic construct
  source 1..20: mol_type = other DNA; note = chemically synthesized
gagggcccactcctgttaaa

SEQ ID NO: 141994 - DNA, 20 bp, synthetic construct
  source 1..20: mol_type = other DNA; note = chemically synthesized
caccgaagatgccatttaac

SEQ ID NO: 141995 - skipped

SEQ ID NO: 141996 - DNA, 20 bp, synthetic construct
  source 1..20: mol_type = other DNA; note = chemically synthesized
ctcctgttaaatggcatctt

SEQ ID NO: 141997 - skipped

SEQ ID NO: 141998 - DNA, 20 bp, synthetic construct
  source 1..20: mol_type = other DNA; note = chemically synthesized
atcttcggtgtgtccttaca

SEQ ID NO: 141999-142008 - skipped (10 entries)

SEQ ID NO: 142009 - DNA, 20 bp, synthetic construct
  source 1..20: mol_type = other DNA; note = chemically synthesized
gggagggcaaggaagctttc

SEQ ID NO: 142010-142014 - skipped (5 entries)

SEQ ID NO: 142015 - DNA, 20 bp, synthetic construct
  source 1..20: mol_type = other DNA; note = chemically synthesized
tttctggagccgcttttata

SEQ ID NO: 142016-142025 - skipped (10 entries)

SEQ ID NO: 142026 - DNA, 20 bp, synthetic construct
  source 1..20: mol_type = other DNA; note = chemically synthesized
ggggggtgattaggtcatgc

SEQ ID NO: 142027-142057 - skipped (31 entries)

SEQ ID NO: 142058 - DNA, 20 bp, synthetic construct
  source 1..20: mol_type = other DNA; note = chemically synthesized
ccacgggaatttccataagg

SEQ ID NO: 142059-142071 - skipped (13 entries)

SEQ ID NO: 142072 - DNA, 20 bp, synthetic construct
  source 1..20: mol_type = other DNA; note = chemically synthesized
gctaaagttcgttgccttcc

SEQ ID NO: 142073-142076 - skipped (4 entries)

SEQ ID NO: 142077 - DNA, 20 bp, synthetic construct
  source 1..20: mol_type = other DNA; note = chemically synthesized
cactggatgtgggctactcc

SEQ ID NO: 142078-142079 - skipped (2 entries)

SEQ ID NO: 142080 - DNA, 20 bp, synthetic construct
  source 1..20: mol_type = other DNA; note = chemically synthesized
tcaagtcatgcactggatgt

SEQ ID NO: 142081-142082 - skipped (2 entries)

SEQ ID NO: 142083 - DNA, 20 bp, synthetic construct
  source 1..20: mol_type = other DNA; note = chemically synthesized
atccagtgcatgacttgaca

SEQ ID NO: 142084 - skipped

SEQ ID NO: 142085 - DNA, 20 bp, synthetic construct
  source 1..20: mol_type = other DNA; note = chemically synthesized
ccagtgcatgacttgacacg

SEQ ID NO: 142086-142088 - skipped (3 entries)

SEQ ID NO: 142089 - DNA, 20 bp, synthetic construct
  source 1..20: mol_type = other DNA; note = chemically synthesized
aggaaacgaagaaaggggac

SEQ ID NO: 142090 - DNA, 20 bp, synthetic construct
  source 1..20: mol_type = other DNA; note = chemically synthesized
gtgctaggaaacgaagaaag

SEQ ID NO: 142091 - DNA, 20 bp, synthetic construct
  source 1..20: mol_type = other DNA; note = chemically synthesized
agtgctaggaaacgaagaaa

SEQ ID NO: 142092 - DNA, 20 bp, synthetic construct
  source 1..20: mol_type = other DNA; note = chemically synthesized
aagtgctaggaaacgaagaa

SEQ ID NO: 142093-142095 - skipped (3 entries)

SEQ ID NO: 142096 - DNA, 20 bp, synthetic construct
  source 1..20: mol_type = other DNA; note = chemically synthesized
aatgacccttcagaagtgct

SEQ ID NO: 142097-142104 - skipped (8 entries)

SEQ ID NO: 142105 - DNA, 20 bp, synthetic construct
  source 1..20: mol_type = other DNA; note = chemically synthesized
cgttcagggagttcttaagc

SEQ ID NO: 142106-142110 - skipped (5 entries)

SEQ ID NO: 142111 - DNA, 20 bp, synthetic construct
  source 1..20: mol_type = other DNA; note = chemically synthesized
agggcctcagctgaccgttc

SEQ ID NO: 142112-142113 - skipped (2 entries)

SEQ ID NO: 142114 - DNA, 20 bp, synthetic construct
  source 1..20: mol_type = other DNA; note = chemically synthesized
actccctgaacggtcagctg

SEQ ID NO: 142115-142126 - skipped (12 entries)

SEQ ID NO: 142127 - DNA, 20 bp, synthetic construct
  source 1..20: mol_type = other DNA; note = chemically synthesized
ggtcaacgtgtaggggcaga

SEQ ID NO: 142128-142131 - skipped (4 entries)

SEQ ID NO: 142132 - DNA, 20 bp, synthetic construct
  source 1..20: mol_type = other DNA; note = chemically synthesized
gttcttggggtcaacgtgta

SEQ ID NO: 142133 - DNA, 20 bp, synthetic construct
  source 1..20: mol_type = other DNA; note = chemically synthesized
tgttcttggggtcaacgtgt

SEQ ID NO: 142134-142145 - skipped (12 entries)

SEQ ID NO: 142146 - DNA, 20 bp, synthetic construct
  source 1..20: mol_type = other DNA; note = chemically synthesized
tgcatgctcacctcaatctc

SEQ ID NO: 142147 - skipped

SEQ ID NO: 142148 - DNA, 20 bp, synthetic construct
  source 1..20: mol_type = other DNA; note = chemically synthesized
gcatgctcacctcaatctca

SEQ ID NO: 142149-142161 - skipped (13 entries)

SEQ ID NO: 142162 - DNA, 20 bp, synthetic construct
  source 1..20: mol_type = other DNA; note = chemically synthesized
tctttaagtaagtaaaccct

SEQ ID NO: 142163-142164 - skipped (2 entries)

SEQ ID NO: 142165 - DNA, 20 bp, synthetic construct
  source 1..20: mol_type = other DNA; note = chemically synthesized
gaaatcagtcccaaatgcct

SEQ ID NO: 142166-142191 - skipped (26 entries)

SEQ ID NO: 142192 - DNA, 20 bp, synthetic construct
  source 1..20: mol_type = other DNA; note = chemically synthesized
tgctcctttatcaagtactt

SEQ ID NO: 142193-142207 - skipped (15 entries)

SEQ ID NO: 142208 - DNA, 20 bp, synthetic construct
  source 1..20: mol_type = other DNA; note = chemically synthesized
agacttcctgcatatctctc

SEQ ID NO: 142209-142212 - skipped (4 entries)

SEQ ID NO: 142213 - DNA, 20 bp, synthetic construct
  source 1..20: mol_type = other DNA; note = chemically synthesized
gggtcaaacacacctgtttg

SEQ ID NO: 142214 - DNA, 20 bp, synthetic construct
  source 1..20: mol_type = other DNA; note = chemically synthesized
gaaagtcagtggccacaaac

SEQ ID NO: 142215-142224 - skipped (10 entries)

SEQ ID NO: 142225 - DNA, 20 bp, synthetic construct
  source 1..20: mol_type = other DNA; note = chemically synthesized
cagacgacagagtgtgccca

SEQ ID NO: 142226-142230 - skipped (5 entries)

SEQ ID NO: 142231 - DNA, 20 bp, synthetic construct
  source 1..20: mol_type = other DNA; note = chemically synthesized
ggagggcaccttctgttgag

SEQ ID NO: 142232-142248 - skipped (17 entries)

SEQ ID NO: 142249 - DNA, 20 bp, synthetic construct
  source 1..20: mol_type = other DNA; note = chemically synthesized
atagattcaaatttttcagt

SEQ ID NO: 142250-142270 - skipped (21 entries)

SEQ ID NO: 142271 - DNA, 20 bp, synthetic construct
  source 1..20: mol_type = other DNA; note = chemically synthesized
atttgtaccatcaattggaa

SEQ ID NO: 142272-142321 - skipped (50 entries)

SEQ ID NO: 142322 - DNA, 20 bp, synthetic construct
  source 1..20: mol_type = other DNA; note = chemically synthesized
gaggttggcataaccatcaa

SEQ ID NO: 142323-142373 - skipped (51 entries)

SEQ ID NO: 142374 - DNA, 20 bp, synthetic construct
  source 1..20: mol_type = other DNA; note = chemically synthesized
ttaaagcttctctatatttc

SEQ ID NO: 142375-142423 - skipped (49 entries)

SEQ ID NO: 142424 - DNA, 20 bp, synthetic construct
  source 1..20: mol_type = other DNA; note = chemically synthesized
taaaatctggaaagagaatg

SEQ ID NO: 142425-142460 - skipped (36 entries)

SEQ ID NO: 142461 - DNA, 20 bp, synthetic construct
  source 1..20: mol_type = other DNA; note = chemically synthesized
tctctagagcaactgtctga

SEQ ID NO: 142462 - DNA, 20 bp, synthetic construct
  source 1..20: mol_type = other DNA; note = chemically synthesized
ttctctagagcaactgtctg

SEQ ID NO: 142463-142466 - skipped (4 entries)

SEQ ID NO: 142467 - DNA, 20 bp, synthetic construct
  source 1..20: mol_type = other DNA; note = chemically synthesized
tcagacagttgctctagaga

SEQ ID NO: 142468-142472 - skipped (5 entries)

SEQ ID NO: 142473 - DNA, 20 bp, synthetic construct
  source 1..20: mol_type = other DNA; note = chemically synthesized
aggaatggctgcttggaccc

SEQ ID NO: 142474-142476 - skipped (3 entries)

SEQ ID NO: 142477 - DNA, 20 bp, synthetic construct
  source 1..20: mol_type = other DNA; note = chemically synthesized
tcaccatgatgtacctacca

SEQ ID NO: 142478-142479 - skipped (2 entries)

SEQ ID NO: 142480 - DNA, 20 bp, synthetic construct
  source 1..20: mol_type = other DNA; note = chemically synthesized
ggaccctggtaggtacatca

SEQ ID NO: 142481-142482 - skipped (2 entries)

SEQ ID NO: 142483 - DNA, 20 bp, synthetic construct
  source 1..20: mol_type = other DNA; note = chemically synthesized
ggtaggtacatcatggtgag

SEQ ID NO: 142484 - skipped

SEQ ID NO: 142485 - DNA, 20 bp, synthetic construct
  source 1..20: mol_type = other DNA; note = chemically synthesized
taatttgtgaagttgttacc

SEQ ID NO: 142486-142518 - skipped (33 entries)

SEQ ID NO: 142519 - DNA, 20 bp, synthetic construct
  source 1..20: mol_type = other DNA; note = chemically synthesized
ctctacacaaatggtttcca

SEQ ID NO: 142520-142641 - skipped (122 entries)

SEQ ID NO: 142642 - DNA, 20 bp, synthetic construct
  source 1..20: mol_type = other DNA; note = chemically synthesized
ttctggacatgatttcacag

SEQ ID NO: 142643 - DNA, 20 bp, synthetic construct
  source 1..20: mol_type = other DNA; note = chemically synthesized
attctggacatgatttcaca

SEQ ID NO: 142644-142662 - skipped (19 entries)

SEQ ID NO: 142663 - DNA, 20 bp, synthetic construct
  source 1..20: mol_type = other DNA; note = chemically synthesized
tttgcatgtacgataataac

SEQ ID NO: 142664-142784 - skipped (121 entries)

SEQ ID NO: 142785 - DNA, 20 bp, synthetic construct
  source 1..20: mol_type = other DNA; note = chemically synthesized
ttagaacaaccatagaagga

SEQ ID NO: 142786-142787 - skipped (2 entries)

SEQ ID NO: 142788 - DNA, 20 bp, synthetic construct
  source 1..20: mol_type = other DNA; note = chemically synthesized
agggcaatatctacaagttt

SEQ ID NO: 142789-142791 - skipped (3 entries)

SEQ ID NO: 142792 - DNA, 20 bp, synthetic construct
  source 1..20: mol_type = other DNA; note = chemically synthesized
atctacaagtttgggccatg

SEQ ID NO: 142793-142801 - skipped (9 entries)

SEQ ID NO: 142802 - DNA, 20 bp, synthetic construct
  source 1..20: mol_type = other DNA; note = chemically synthesized
cgaatggccatgtaaatatt

SEQ ID NO: 142803-142819 - skipped (17 entries)

SEQ ID NO: 142820 - DNA, 20 bp, synthetic construct
  source 1..20: mol_type = other DNA; note = chemically synthesized
caagaaaggcaacattggta

SEQ ID NO: 142821-142829 - skipped (9 entries)

SEQ ID NO: 142830 - DNA, 20 bp, synthetic construct
  source 1..20: mol_type = other DNA; note = chemically synthesized
ttgattatcattgctagaac

SEQ ID NO: 142831-142842 - skipped (12 entries)

SEQ ID NO: 142843 - DNA, 20 bp, synthetic construct
  source 1..20: mol_type = other DNA; note = chemically synthesized
tgaactcagtgggtttattt

SEQ ID NO: 142844-142892 - skipped (49 entries)

SEQ ID NO: 142893 - DNA, 20 bp, synthetic construct
  source 1..20: mol_type = other DNA; note = chemically synthesized
gtgcattattaagagtatct

SEQ ID NO: 142894-142900 - skipped (7 entries)

SEQ ID NO: 142901 - DNA, 20 bp, synthetic construct
  source 1..20: mol_type = other DNA; note = chemically synthesized
ggaaagaaagggtatcggat

SEQ ID NO: 142902 - skipped

SEQ ID NO: 142903 - DNA, 20 bp, synthetic construct
  source 1..20: mol_type = other DNA; note = chemically synthesized
aagaaggaaagaaagggtat

SEQ ID NO: 142904 - DNA, 20 bp, synthetic construct
  source 1..20: mol_type = other DNA; note = chemically synthesized
ttagctaagaaggaaagaaa

SEQ ID NO: 142905-142925 - skipped (21 entries)

SEQ ID NO: 142926 - DNA, 20 bp, synthetic construct
  source 1..20: mol_type = other DNA; note = chemically synthesized
attgagtgttttaactgaat

SEQ ID NO: 142927-142929 - skipped (3 entries)

SEQ ID NO: 142930 - DNA, 20 bp, synthetic construct
  source 1..20: mol_type = other DNA; note = chemically synthesized
taacttctaaggatcttggg

SEQ ID NO: 142931 - skipped

SEQ ID NO: 142932 - DNA, 20 bp, synthetic construct
  source 1..20: mol_type = other DNA; note = chemically synthesized
tcctaacttctaaggatctt

SEQ ID NO: 142933-142955 - skipped (23 entries)

SEQ ID NO: 142956 - DNA, 20 bp, synthetic construct
  source 1..20: mol_type = other DNA; note = chemically synthesized
tggggctgccagaaaagcac

SEQ ID NO: 142957-142963 - skipped (7 entries)

SEQ ID NO: 142964 - DNA, 20 bp, synthetic construct
  source 1..20: mol_type = other DNA; note = chemically synthesized
caaacaggagctgacacagc

SEQ ID NO: 142965-142981 - skipped (17 entries)

SEQ ID NO: 142982 - DNA, 20 bp, synthetic construct
  source 1..20: mol_type = other DNA; note = chemically synthesized
agtacagacatagtgcctgg

SEQ ID NO: 142983-142993 - skipped (11 entries)

SEQ ID NO: 142994 - DNA, 20 bp, synthetic construct
  source 1..20: mol_type = other DNA; note = chemically synthesized
cacaggaaaaaaagtcttgc

SEQ ID NO: 142995-143091 - skipped (97 entries)

SEQ ID NO: 143092 - DNA, 20 bp, synthetic construct
  source 1..20: mol_type = other DNA; note = chemically synthesized
tctcatgttggagatgactg

SEQ ID NO: 143093-143097 - skipped (5 entries)

SEQ ID NO: 143098 - DNA, 20 bp, synthetic construct
  source 1..20: mol_type = other DNA; note = chemically synthesized
ctggggttggaggaaaaagt

SEQ ID NO: 143099 - skipped

SEQ ID NO: 143100 - DNA, 20 bp, synthetic construct
  source 1..20: mol_type = other DNA; note = chemically synthesized
gaggaaaaagttgggacata

SEQ ID NO: 143101-143104 - skipped (4 entries)

SEQ ID NO: 143105 - DNA, 20 bp, synthetic construct
  source 1..20: mol_type = other DNA; note = chemically synthesized
tggaggtgctgcactgaccc

SEQ ID NO: 143106-143123 - skipped (18 entries)

SEQ ID NO: 143124 - DNA, 20 bp, synthetic construct
  source 1..20: mol_type = other DNA; note = chemically synthesized
tgacagcattctcactacag

SEQ ID NO: 143125-143363 - skipped (239 entries)

SEQ ID NO: 143364 - DNA, 20 bp, synthetic construct
  source 1..20: mol_type = other DNA; note = chemically synthesized
ctgaggtgacatgatctctt

SEQ ID NO: 143365-143380 - skipped (16 entries)

SEQ ID NO: 143381 - DNA, 20 bp, synthetic construct
  source 1..20: mol_type = other DNA; note = chemically synthesized
gttagctggctgtgatggtg

SEQ ID NO: 143382-143396 - skipped (15 entries)

SEQ ID NO: 143397 - DNA, 20 bp, synthetic construct
  source 1..20: mol_type = other DNA; note = chemically synthesized
ccagaagttcaagagcaacc

SEQ ID NO: 143398-143405 - skipped (8 entries)

SEQ ID NO: 143406 - DNA, 20 bp, synthetic construct
  source 1..20: mol_type = other DNA; note = chemically synthesized
ccaggatggaggatcccttg

SEQ ID NO: 143407-143417 - skipped (11 entries)

SEQ ID NO: 143418 - DNA, 20 bp, synthetic construct
  source 1..20: mol_type = other DNA; note = chemically synthesized
gaggacgggtccagacacaa

SEQ ID NO: 143419-143440 - skipped (22 entries)

SEQ ID NO: 143441 - DNA, 20 bp, synthetic construct
  source 1..20: mol_type = other DNA; note = chemically synthesized
actagaagaggacatttact

SEQ ID NO: 143442-143454 - skipped (13 entries)

SEQ ID NO: 143455 - DNA, 20 bp, synthetic construct
  source 1..20: mol_type = other DNA; note = chemically synthesized
aaatcaaacttgagtaagtg

SEQ ID NO: 143456-143464 - skipped (9 entries)

SEQ ID NO: 143465 - DNA, 20 bp, synthetic construct
  source 1..20: mol_type = other DNA; note = chemically synthesized
tttatgtagaatttctcaga

SEQ ID NO: 143466-143484 - skipped (19 entries)

SEQ ID NO: 143485 - DNA, 20 bp, synthetic construct
  source 1..20: mol_type = other DNA; note = chemically synthesized
agaagtagattgtagtgaga

SEQ ID NO: 143486 - DNA, 20 bp, synthetic construct
  source 1..20: mol_type = other DNA; note = chemically synthesized
aagaagtagattgtagtgag

SEQ ID NO: 143487-143502 - skipped (16 entries)

SEQ ID NO: 143503 - DNA, 20 bp, synthetic construct
  source 1..20: mol_type = other DNA; note = chemically synthesized
gtggagaggagagagtaatt

SEQ ID NO: 143504-143530 - skipped (27 entries)

SEQ ID NO: 143531 - DNA, 20 bp, synthetic construct
  source 1..20: mol_type = other DNA; note = chemically synthesized
catagattaacttgatatgg

SEQ ID NO: 143532-143625 - skipped (94 entries)

SEQ ID NO: 143626 - DNA, 20 bp, synthetic construct
  source 1..20: mol_type = other DNA; note = chemically synthesized
aacaaaaattaaaaagggat

SEQ ID NO: 143627-143691 - skipped (65 entries)

SEQ ID NO: 143692 - DNA, 20 bp, synthetic construct
  source 1..20: mol_type = other DNA; note = chemically synthesized
gagacactagagtaataatt

SEQ ID NO: 143693-143723 - skipped (31 entries)

SEQ ID NO: 143724 - DNA, 20 bp, synthetic construct
  source 1..20: mol_type = other DNA; note = chemically synthesized
taacattaccctaacattaa

SEQ ID NO: 143725-143946 - skipped (222 entries)

SEQ ID NO: 143947 - DNA, 20 bp, synthetic construct
  source 1..20: mol_type = other DNA; note = chemically synthesized
gttgaagataatagtggatt

SEQ ID NO: 143948-143962 - skipped (15 entries)

SEQ ID NO: 143963 - DNA, 20 bp, synthetic construct
  source 1..20: mol_type = other DNA; note = chemically synthesized
ccaacaaatgtacatgtctc

SEQ ID NO: 143964 - DNA, 20 bp, synthetic construct
  source 1..20: mol_type = other DNA; note = chemically synthesized
ccagagacatgtacatttgt

SEQ ID NO: 143965-144001 - skipped (37 entries)

SEQ ID NO: 144002 - DNA, 20 bp, synthetic construct
  source 1..20: mol_type = other DNA; note = chemically synthesized
gcaaacatggtttatttcca

SEQ ID NO: 144003-144015 - skipped (13 entries)

SEQ ID NO: 144016 - DNA, 20 bp, synthetic construct
  source 1..20: mol_type = other DNA; note = chemically synthesized
gatgtgtaagaagttgaggg

SEQ ID NO: 144017 - DNA, 20 bp, synthetic construct
  source 1..20: mol_type = other DNA; note = chemically synthesized
gtgtaagaagttgagggggg

SEQ ID NO: 144018-144034 - skipped (17 entries)

SEQ ID NO: 144035 - DNA, 20 bp, synthetic construct
  source 1..20: mol_type = other DNA; note = chemically synthesized
tcccaagaggtctgggggtc

SEQ ID NO: 144036-144056 - skipped (21 entries)

SEQ ID NO: 144057 - DNA, 20 bp, synthetic construct
  source 1..20: mol_type = other DNA; note = chemically synthesized
tgtaatagccactttctgct

SEQ ID NO: 144058-144067 - skipped (10 entries)

SEQ ID NO: 144068 - DNA, 20 bp, synthetic construct
  source 1..20: mol_type = other DNA; note = chemically synthesized
atgtgtgggtaaagtggcat

SEQ ID NO: 144069 - DNA, 20 bp, synthetic construct
  source 1..20: mol_type = other DNA; note = chemically synthesized
gggacaatgtgtgggtaaag

SEQ ID NO: 144070 - skipped

SEQ ID NO: 144071 - DNA, 20 bp, synthetic construct
  source 1..20: mol_type = other DNA; note = chemically synthesized
gaattgatgggacaatgtgt

SEQ ID NO: 144072-144073 - skipped (2 entries)

SEQ ID NO: 144074 - DNA, 20 bp, synthetic construct
  source 1..20: mol_type = other DNA; note = chemically synthesized
tatagccctggaagaattga

SEQ ID NO: 144075 - skipped

SEQ ID NO: 144076 - DNA, 20 bp, synthetic construct
  source 1..20: mol_type = other DNA; note = chemically synthesized
attgtcccatcaattcttcc

SEQ ID NO: 144077-144115 - skipped (39 entries)

SEQ ID NO: 144116 - DNA, 20 bp, synthetic construct
  source 1..20: mol_type = other DNA; note = chemically synthesized
cacacattgcactgttacct

SEQ ID NO: 144117 - DNA, 20 bp, synthetic construct
  source 1..20: mol_type = other DNA; note = chemically synthesized
ccacacattgcactgttacc

SEQ ID NO: 144118-144130 - skipped (13 entries)

SEQ ID NO: 144131 - DNA, 20 bp, synthetic construct
  source 1..20: mol_type = other DNA; note = chemically synthesized
ccagtaagacctttccagat

SEQ ID NO: 144132-144133 - skipped (2 entries)

SEQ ID NO: 144134 - DNA, 20 bp, synthetic construct
  source 1..20: mol_type = other DNA; note = chemically synthesized
ccaatctggaaaggtcttac

SEQ ID NO: 144135 - skipped

SEQ ID NO: 144136 - DNA, 20 bp, synthetic construct
  source 1..20: mol_type = other DNA; note = chemically synthesized
atctggaaaggtcttactgg

SEQ ID NO: 144137-144140 - skipped (4 entries)

SEQ ID NO: 144141 - DNA, 20 bp, synthetic construct
  source 1..20: mol_type = other DNA; note = chemically synthesized
tattgaataaagaattgagt

SEQ ID NO: 144142-144151 - skipped (10 entries)

SEQ ID NO: 144152 - DNA, 20 bp, synthetic construct
  source 1..20: mol_type = other DNA; note = chemically synthesized
atcctgaacacctggccaaa

SEQ ID NO: 144153-144182 - skipped (30 entries)

SEQ ID NO: 144183 - DNA, 20 bp, synthetic construct
  source 1..20: mol_type = other DNA; note = chemically synthesized
caggagggagaaaggtggag

SEQ ID NO: 144184 - skipped

SEQ ID NO: 144185 - DNA, 20 bp, synthetic construct
  source 1..20: mol_type = other DNA; note = chemically synthesized
gacaggagggagaaaggtgg

SEQ ID NO: 144186 - skipped

SEQ ID NO: 144187 - DNA, 20 bp, synthetic construct
  source 1..20: mol_type = other DNA; note = chemically synthesized
ggagacaggagggagaaagg

SEQ ID NO: 144188-144191 - skipped (4 entries)

SEQ ID NO: 144192 - DNA, 20 bp, synthetic construct
  source 1..20: mol_type = other DNA; note = chemically synthesized
gagggatggtgggagacagg

SEQ ID NO: 144193-144196 - skipped (4 entries)

SEQ ID NO: 144197 - DNA, 20 bp, synthetic construct
  source 1..20: mol_type = other DNA; note = chemically synthesized
ggaaatggaagagggatggt

SEQ ID NO: 144198 - DNA, 20 bp, synthetic construct
  source 1..20: mol_type = other DNA; note = chemically synthesized
aggaaatggaagagggatgg

SEQ ID NO: 144199 - DNA, 20 bp, synthetic construct
  source 1..20: mol_type = other DNA; note = chemically synthesized
aggaggaaatggaagaggga

SEQ ID NO: 144200 - DNA, 20 bp, synthetic construct
  source 1..20: mol_type = other DNA; note = chemically synthesized
ggaaaggaggaaatggaaga

SEQ ID NO: 144201 - DNA, 20 bp, synthetic construct
  source 1..20: mol_type = other DNA; note = chemically synthesized
aggaaaggaggaaatggaag

SEQ ID NO: 144202-144208 - skipped (7 entries)

SEQ ID NO: 144209 - DNA, 20 bp, synthetic construct
  source 1..20: mol_type = other DNA; note = chemically synthesized
aagaggacaaaagaggagtg

SEQ ID NO: 144210-144211 - skipped (2 entries)

SEQ ID NO: 144212 - DNA, 20 bp, synthetic construct
  source 1..20: mol_type = other DNA; note = chemically synthesized
aatattaaagaggacaaaag

SEQ ID NO: 144213-144214 - skipped (2 entries)

SEQ ID NO: 144215 - DNA, 20 bp, synthetic construct
  source 1..20: mol_type = other DNA; note = chemically synthesized
acaagaaaggaatattaaag

SEQ ID NO: 144216-144234 - skipped (19 entries)

SEQ ID NO: 144235 - DNA, 20 bp, synthetic construct
  source 1..20: mol_type = other DNA; note = chemically synthesized
ggaaggaaagcaggaaaaag

SEQ ID NO: 144236-144238 - skipped (3 entries)

SEQ ID NO: 144239 - DNA, 20 bp, synthetic construct
  source 1..20: mol_type = other DNA; note = chemically synthesized
aggaagagaggaaggaaagc

SEQ ID NO: 144240-144267 - skipped (28 entries)

SEQ ID NO: 144268 - DNA, 20 bp, synthetic construct
  source 1..20: mol_type = other DNA; note = chemically synthesized
aggaaggagagaacaaagaa

SEQ ID NO: 144269 - DNA, 20 bp, synthetic construct
  source 1..20: mol_type = other DNA; note = chemically synthesized
aaggaaggagagaacaaaga

SEQ ID NO: 144270-144277 - skipped (8 entries)

SEQ ID NO: 144278 - DNA, 20 bp, synthetic construct
  source 1..20: mol_type = other DNA; note = chemically synthesized
taaatctgacccttaaggaa

SEQ ID NO: 144279-144356 - skipped (78 entries)

SEQ ID NO: 144357 - DNA, 20 bp, synthetic construct
  source 1..20: mol_type = other DNA; note = chemically synthesized
aatcaagcaatacatactaa

SEQ ID NO: 144358-144371 - skipped (14 entries)

SEQ ID NO: 144372 - DNA, 20 bp, synthetic construct
  source 1..20: mol_type = other DNA; note = chemically synthesized
caaagtctaaagctagtgaa

SEQ ID NO: 144373-144378 - skipped (6 entries)

SEQ ID NO: 144379 - DNA, 20 bp, synthetic construct
  source 1..20: mol_type = other DNA; note = chemically synthesized
atgtccttataccccttctg

SEQ ID NO: 144380 - DNA, 20 bp, synthetic construct
  source 1..20: mol_type = other DNA; note = chemically synthesized
tgaaatatttgccacagaag

SEQ ID NO: 144381-144413 - skipped (33 entries)

SEQ ID NO: 144414 - DNA, 20 bp, synthetic construct
  source 1..20: mol_type = other DNA; note = chemically synthesized
aataaatgtggatagcttga

SEQ ID NO: 144415-144477 - skipped (63 entries)

SEQ ID NO: 144478 - DNA, 20 bp, synthetic construct
  source 1..20: mol_type = other DNA; note = chemically synthesized
ctgggacgcatgtggctcac

SEQ ID NO: 144479-144494 - skipped (16 entries)

SEQ ID NO: 144495 - DNA, 20 bp, synthetic construct
  source 1..20: mol_type = other DNA; note = chemically synthesized
gaacatgtagaataagttgg

SEQ ID NO: 144496-144547 - skipped (52 entries)

SEQ ID NO: 144548 - DNA, 20 bp, synthetic construct
  source 1..20: mol_type = other DNA; note = chemically synthesized
agagtccagttcaccttgtt

SEQ ID NO: 144549-144590 - skipped (42 entries)

SEQ ID NO: 144591 - DNA, 20 bp, synthetic construct
  source 1..20: mol_type = other DNA; note = chemically synthesized
aatcattctctgattaaatc

SEQ ID NO: 144592-144602 - skipped (11 entries)

SEQ ID NO: 144603 - DNA, 20 bp, synthetic construct
  source 1..20: mol_type = other DNA; note = chemically synthesized
tccagagagctctaattgat

SEQ ID NO: 144604-144631 - skipped (28 entries)

SEQ ID NO: 144632 - DNA, 20 bp, synthetic construct
  source 1..20: mol_type = other DNA; note = chemically synthesized
gaggttgaatagagaggact

SEQ ID NO: 144633-144637 - skipped (5 entries)

SEQ ID NO: 144638 - DNA, 20 bp, synthetic construct
  source 1..20: mol_type = other DNA; note = chemically synthesized
tgatgaggaagaaattgatg

SEQ ID NO: 144639-144640 - skipped (2 entries)

SEQ ID NO: 144641 - DNA, 20 bp, synthetic construct
  source 1..20: mol_type = other DNA; note = chemically synthesized
gaagttaagggtatatgatg

SEQ ID NO: 144642-144648 - skipped (7 entries)

SEQ ID NO: 144649 - DNA, 20 bp, synthetic construct
  source 1..20: mol_type = other DNA; note = chemically synthesized
agaggaattgtgattccata

SEQ ID NO: 144650-144666 - skipped (17 entries)

SEQ ID NO: 144667 - DNA, 20 bp, synthetic construct
  source 1..20: mol_type = other DNA; note = chemically synthesized
taaaacgagaagggcaatcc

SEQ ID NO: 144668-144677 - skipped (10 entries)

SEQ ID NO: 144678 - DNA, 20 bp, synthetic construct
  source 1..20: mol_type = other DNA; note = chemically synthesized
ccaggcattaaagaatgagt

SEQ ID NO: 144679-144694 - skipped (16 entries)

SEQ ID NO: 144695 - DNA, 20 bp, synthetic construct
  source 1..20: mol_type = other DNA; note = chemically synthesized
ctagcatccattctctctcc

SEQ ID NO: 144696-144708 - skipped (13 entries)

SEQ ID NO: 144709 - DNA, 20 bp, synthetic construct
  source 1..20: mol_type = other DNA; note = chemically synthesized
ttgtgtgggtgatgctgttg

SEQ ID NO: 144710 - skipped

SEQ ID NO: 144711 - DNA, 20 bp, synthetic construct
  source 1..20: mol_type = other DNA; note = chemically synthesized
tattgtgtgggtgatgctgt

SEQ ID NO: 144712 - DNA, 20 bp, synthetic construct
  source 1..20: mol_type = other DNA; note = chemically synthesized
caacttctctgatattgtgt

SEQ ID NO: 144713 - DNA, 20 bp, synthetic construct
  source 1..20: mol_type = other DNA; note = chemically synthesized
tcaacttctctgatattgtg

SEQ ID NO: 144714-144717 - skipped (4 entries)

SEQ ID NO: 144718 - DNA, 20 bp, synthetic construct
  source 1..20: mol_type = other DNA; note = chemically synthesized
cagagaagttgaaaactatg

SEQ ID NO: 144719-144720 - skipped (2 entries)

SEQ ID NO: 144721 - DNA, 20 bp, synthetic construct
  source 1..20: mol_type = other DNA; note = chemically synthesized
gttgaaaactatgaggttta

SEQ ID NO: 144722-144728 - skipped (7 entries)

SEQ ID NO: 144729 - DNA, 20 bp, synthetic construct
  source 1..20: mol_type = other DNA; note = chemically synthesized
agatgtgaactcaggcagtt

SEQ ID NO: 144730-144731 - skipped (2 entries)

SEQ ID NO: 144732 - DNA, 20 bp, synthetic construct
  source 1..20: mol_type = other DNA; note = chemically synthesized
caatgatgagatgtgaactc

SEQ ID NO: 144733-144746 - skipped (14 entries)

SEQ ID NO: 144747 - DNA, 20 bp, synthetic construct
  source 1..20: mol_type = other DNA; note = chemically synthesized
ttactgtgaggtagatagag

SEQ ID NO: 144748-144781 - skipped (34 entries)

SEQ ID NO: 144782 - DNA, 20 bp, synthetic construct
  source 1..20: mol_type = other DNA; note = chemically synthesized
tgagctgccactaagtacct

SEQ ID NO: 144783-144789 - skipped (7 entries)

SEQ ID NO: 144790 - DNA, 20 bp, synthetic construct
  source 1..20: mol_type = other DNA; note = chemically synthesized
agtggcagctcaatagaagt

SEQ ID NO: 144791-144813 - skipped (23 entries)

SEQ ID NO: 144814 - DNA, 20 bp, synthetic construct
  source 1..20: mol_type = other DNA; note = chemically synthesized
taagaaggataagtaagtat

SEQ ID NO: 144815-144852 - skipped (38 entries)

SEQ ID NO: 144853 - DNA, 20 bp, synthetic construct
  source 1..20: mol_type = other DNA; note = chemically synthesized
cttctcttgcttgctgaata

SEQ ID NO: 144854-144859 - skipped (6 entries)

SEQ ID NO: 144860 - DNA, 20 bp, synthetic construct
  source 1..20: mol_type = other DNA; note = chemically synthesized
cctattcagcaagcaagaga

SEQ ID NO: 144861-144978 - skipped (118 entries)

SEQ ID NO: 144979 - DNA, 20 bp, synthetic construct
  source 1..20: mol_type = other DNA; note = chemically synthesized
ttaaagacgatctctgtgag

SEQ ID NO: 144980-144998 - skipped (19 entries)

SEQ ID NO: 144999 - DNA, 20 bp, synthetic construct
  source 1..20: mol_type = other DNA; note = chemically synthesized
gagactactgagcacatcaa

SEQ ID NO: 145000-145001 - skipped (2 entries)

SEQ ID NO: 145002 - DNA, 20 bp, synthetic construct
  source 1..20: mol_type = other DNA; note = chemically synthesized
gtttgtgagtccagcattta

SEQ ID NO: 145003-145007 - skipped (5 entries)

SEQ ID NO: 145008 - DNA, 20 bp, synthetic construct
  source 1..20: mol_type = other DNA; note = chemically synthesized
ggactcacaaacccgtcaca

SEQ ID NO: 145009 - DNA, 20 bp, synthetic construct
  source 1..20: mol_type = other DNA; note = chemically synthesized
agtccacacttccttgtgac

SEQ ID NO: 145010 - DNA, 20 bp, synthetic construct
  source 1..20: mol_type = other DNA; note = chemically synthesized
aagtccacacttccttgtga

SEQ ID NO: 145011-145021 - skipped (11 entries)

SEQ ID NO: 145022 - DNA, 20 bp, synthetic construct
  source 1..20: mol_type = other DNA; note = chemically synthesized
tattatctggtaacttctgc

SEQ ID NO: 145023-145029 - skipped (7 entries)

SEQ ID NO: 145030 - DNA, 20 bp, synthetic construct
  source 1..20: mol_type = other DNA; note = chemically synthesized
agctatgtcaatggtagact

SEQ ID NO: 145031-145033 - skipped (3 entries)

SEQ ID NO: 145034 - DNA, 20 bp, synthetic construct
  source 1..20: mol_type = other DNA; note = chemically synthesized
ggtagactaggctacagaag

SEQ ID NO: 145035-145062 - skipped (28 entries)

SEQ ID NO: 145063 - DNA, 20 bp, synthetic construct
  source 1..20: mol_type = other DNA; note = chemically synthesized
gtcatcaggattaagttggt

SEQ ID NO: 145064 - DNA, 20 bp, synthetic construct
  source 1..20: mol_type = other DNA; note = chemically synthesized
gtttgtcatcaggattaagt

SEQ ID NO: 145065-145082 - skipped (18 entries)

SEQ ID NO: 145083 - DNA, 20 bp, synthetic construct
  source 1..20: mol_type = other DNA; note = chemically synthesized
agctagataaacttgggctc

SEQ ID NO: 145084-145085 - skipped (2 entries)

SEQ ID NO: 145086 - DNA, 20 bp, synthetic construct
  source 1..20: mol_type = other DNA; note = chemically synthesized
agataaacttgggctcaggt

SEQ ID NO: 145087-145094 - skipped (8 entries)

SEQ ID NO: 145095 - DNA, 20 bp, synthetic construct
  source 1..20: mol_type = other DNA; note = chemically synthesized
tactcaaggtcacacagctt

SEQ ID NO: 145096-145105 - skipped (10 entries)

SEQ ID NO: 145106 - DNA, 20 bp, synthetic construct
  source 1..20: mol_type = other DNA; note = chemically synthesized
acaatgtaacttcaaaacct

SEQ ID NO: 145107-145156 - skipped (50 entries)

SEQ ID NO: 145157 - DNA, 20 bp, synthetic construct
  source 1..20: mol_type = other DNA; note = chemically synthesized
gcaagtaataacacaagctt

SEQ ID NO: 145158-145199 - skipped (42 entries)

SEQ ID NO: 145200 - DNA, 20 bp, synthetic construct
  source 1..20: mol_type = other DNA; note = chemically synthesized
aggaaacgaagatccagaga

SEQ ID NO: 145201 - DNA, 20 bp, synthetic construct
  source 1..20: mol_type = other DNA; note = chemically synthesized
gattgtggtcaagccatctc

SEQ ID NO: 145202-145226 - skipped (25 entries)

SEQ ID NO: 145227 - DNA, 20 bp, synthetic construct
  source 1..20: mol_type = other DNA; note = chemically synthesized
aagtgaggcagacagagtaa

SEQ ID NO: 145228-145355 - skipped (128 entries)

SEQ ID NO: 145356 - DNA, 20 bp, synthetic construct
  source 1..20: mol_type = other DNA; note = chemically synthesized
agaaacagttgcctaagaac

SEQ ID NO: 145357 - DNA, 20 bp, synthetic construct
  source 1..20: mol_type = other DNA; note = chemically synthesized
accatttcccaccagttctt

SEQ ID NO: 145358-145359 - skipped (2 entries)

SEQ ID NO: 145360 - DNA, 20 bp, synthetic construct
  source 1..20: mol_type = other DNA; note = chemically synthesized
acagttgcctaagaactggt

SEQ ID NO: 145361 - skipped

SEQ ID NO: 145362 - DNA, 20 bp, synthetic construct
  source 1..20: mol_type = other DNA; note = chemically synthesized
gcctaagaactggtgggaaa

SEQ ID NO: 145363-145407 - skipped (45 entries)

SEQ ID NO: 145408 - DNA, 20 bp, synthetic construct
  source 1..20: mol_type = other DNA; note = chemically synthesized
ctgctctggcagatttcaac

SEQ ID NO: 145409-145413 - skipped (5 entries)

SEQ ID NO: 145414 - DNA, 20 bp, synthetic construct
  source 1..20: mol_type = other DNA; note = chemically synthesized
gatgttggaggtacctgctc

SEQ ID NO: 145415-145420 - skipped (6 entries)

SEQ ID NO: 145421 - DNA, 20 bp, synthetic construct
  source 1..20: mol_type = other DNA; note = chemically synthesized
acctccaacatcaaggaaga

SEQ ID NO: 145422 - skipped

SEQ ID NO: 145423 - DNA, 20 bp, synthetic construct
  source 1..20: mol_type = other DNA; note = chemically synthesized
ggaagatggcatttctagtt

SEQ ID NO: 145424-145431 - skipped (8 entries)

SEQ ID NO: 145432 - DNA, 20 bp, synthetic construct
  source 1..20: mol_type = other DNA; note = chemically synthesized
gcagtttccttagtaaccac

SEQ ID NO: 145433 - DNA, 20 bp, synthetic construct
  source 1..20: mol_type = other DNA; note = chemically synthesized
tactctggtgacacaacctg

SEQ ID NO: 145434-145441 - skipped (8 entries)

SEQ ID NO: 145442 - DNA, 20 bp, synthetic construct
  source 1..20: mol_type = other DNA; note = chemically synthesized
aaaatattttagctcctact

SEQ ID NO: 145443 - DNA, 20 bp, synthetic construct
  source 1..20: mol_type = other DNA; note = chemically synthesized
tgcaaaaacccaaaatattt

SEQ ID NO: 145444 - DNA, 20 bp, synthetic construct
  source 1..20: mol_type = other DNA; note = chemically synthesized
gagtaggagctaaaatattt

SEQ ID NO: 145445-145494 - skipped (50 entries)

SEQ ID NO: 145495 - DNA, 20 bp, synthetic construct
  source 1..20: mol_type = other DNA; note = chemically synthesized
aaagttttcagaccttgcca

SEQ ID NO: 145496-145521 - skipped (26 entries)

SEQ ID NO: 145522 - DNA, 20 bp, synthetic construct
  source 1..20: mol_type = other DNA; note = chemically synthesized
cattggctttgatttcccta

SEQ ID NO: 145523-145580 - skipped (58 entries)

SEQ ID NO: 145581 - DNA, 20 bp, synthetic construct
  source 1..20: mol_type = other DNA; note = chemically synthesized
ccaaggtcccagagttccta

SEQ ID NO: 145582 - DNA, 20 bp, synthetic construct
  source 1..20: mol_type = other DNA; note = chemically synthesized
accaaggtcccagagttcct

SEQ ID NO: 145583 - DNA, 20 bp, synthetic construct
  source 1..20: mol_type = other DNA; note = chemically synthesized
gttctctgccctaggaactc

SEQ ID NO: 145584 - skipped

SEQ ID NO: 145585 - DNA, 20 bp, synthetic construct
  source 1..20: mol_type = other DNA; note = chemically synthesized
ttctctgccctaggaactct

SEQ ID NO: 145586 - skipped

SEQ ID NO: 145587 - DNA, 20 bp, synthetic construct
  source 1..20: mol_type = other DNA; note = chemically synthesized
ccctaggaactctgggacct

SEQ ID NO: 145588-145617 - skipped (30 entries)

SEQ ID NO: 145618 - DNA, 20 bp, synthetic construct
  source 1..20: mol_type = other DNA; note = chemically synthesized
cttaaaagaggaataataac

SEQ ID NO: 145619-145621 - skipped (3 entries)

SEQ ID NO: 145622 - DNA, 20 bp, synthetic construct
  source 1..20: mol_type = other DNA; note = chemically synthesized
taacagggtaaatgtcataa

SEQ ID NO: 145623-145651 - skipped (29 entries)

SEQ ID NO: 145652 - DNA, 20 bp, synthetic construct
  source 1..20: mol_type = other DNA; note = chemically synthesized
aacacagtgatgaacaactg

SEQ ID NO: 145653-145657 - skipped (5 entries)

SEQ ID NO: 145658 - DNA, 20 bp, synthetic construct
  source 1..20: mol_type = other DNA; note = chemically synthesized
gtggtgagaaactggagata

SEQ ID NO: 145659-145670 - skipped (12 entries)

SEQ ID NO: 145671 - DNA, 20 bp, synthetic construct
  source 1..20: mol_type = other DNA; note = chemically synthesized
gtcagtcaaaagtccgtgtg

SEQ ID NO: 145672-145691 - skipped (20 entries)

SEQ ID NO: 145692 - DNA, 20 bp, synthetic construct
  source 1..20: mol_type = other DNA; note = chemically synthesized
acacacagctgggttatcag

SEQ ID NO: 145693-145696 - skipped (4 entries)

SEQ ID NO: 145697 - DNA, 20 bp, synthetic construct
  source 1..20: mol_type = other DNA; note = chemically synthesized
ttatcagaggtgagtggtga

SEQ ID NO: 145698-145699 - skipped (2 entries)

SEQ ID NO: 145700 - DNA, 20 bp, synthetic construct
  source 1..20: mol_type = other DNA; note = chemically synthesized
agaggtgagtggtgagggga

SEQ ID NO: 145701-145715 - skipped (15 entries)

SEQ ID NO: 145716 - DNA, 20 bp, synthetic construct
  source 1..20: mol_type = other DNA; note = chemically synthesized
aattattggactatgtagtt

SEQ ID NO: 145717-145725 - skipped (9 entries)

SEQ ID NO: 145726 - DNA, 20 bp, synthetic construct
  source 1..20: mol_type = other DNA; note = chemically synthesized
gctgcaaaagacatctcaac

SEQ ID NO: 145727-145728 - skipped (2 entries)

SEQ ID NO: 145729 - DNA, 20 bp, synthetic construct
  source 1..20: mol_type = other DNA; note = chemically synthesized
tctcaacaggagactcacac

SEQ ID NO: 145730-145785 - skipped (56 entries)

SEQ ID NO: 145786 - DNA, 20 bp, synthetic construct
  source 1..20: mol_type = other DNA; note = chemically synthesized
attgaaaggcagtaacagtg

SEQ ID NO: 145787-145807 - skipped (21 entries)

SEQ ID NO: 145808 - DNA, 20 bp, synthetic construct
  source 1..20: mol_type = other DNA; note = chemically synthesized
agcattttgtgtcacagtcc

SEQ ID NO: 145809-145811 - skipped (3 entries)

SEQ ID NO: 145812 - DNA, 20 bp, synthetic construct
  source 1..20: mol_type = other DNA; note = chemically synthesized
cagtccaggagaagaaatca

SEQ ID NO: 145813-145830 - skipped (18 entries)

SEQ ID NO: 145831 - DNA, 20 bp, synthetic construct
  source 1..20: mol_type = other DNA; note = chemically synthesized
aaggagctaaatatccagag

SEQ ID NO: 145832-145845 - skipped (14 entries)

SEQ ID NO: 145846 - DNA, 20 bp, synthetic construct
  source 1..20: mol_type = other DNA; note = chemically synthesized
ggaactaactgcagaacacc

SEQ ID NO: 145847-145849 - skipped (3 entries)

SEQ ID NO: 145850 - DNA, 20 bp, synthetic construct
  source 1..20: mol_type = other DNA; note = chemically synthesized
accaggctgactggcaaatg

SEQ ID NO: 145851-145859 - skipped (9 entries)

SEQ ID NO: 145860 - DNA, 20 bp, synthetic construct
  source 1..20: mol_type = other DNA; note = chemically synthesized
tagatacacaaggtatactg

SEQ ID NO: 145861-145896 - skipped (36 entries)

SEQ ID NO: 145897 - DNA, 20 bp, synthetic construct
  source 1..20: mol_type = other DNA; note = chemically synthesized
atgatcatttccacctcatt

SEQ ID NO: 145898-145928 - skipped (31 entries)

SEQ ID NO: 145929 - DNA, 20 bp, synthetic construct
  source 1..20: mol_type = other DNA; note = chemically synthesized
aagaaggaaagaagaaagtc

SEQ ID NO: 145930 - DNA, 20 bp, synthetic construct
  source 1..20: mol_type = other DNA; note = chemically synthesized
agaaggaaagaagaaagtca

SEQ ID NO: 145931-145932 - skipped (2 entries)

SEQ ID NO: 145933 - DNA, 20 bp, synthetic construct
  source 1..20: mol_type = other DNA; note = chemically synthesized
ggaaagaagaaagtcaggga

SEQ ID NO: 145934-145968 - skipped (35 entries)

SEQ ID NO: 145969 - DNA, 20 bp, synthetic construct
  source 1..20: mol_type = other DNA; note = chemically synthesized
caaggcaagacaaggcagga

SEQ ID NO: 145970-145977 - skipped (8 entries)

SEQ ID NO: 145978 - DNA, 20 bp, synthetic construct
  source 1..20: mol_type = other DNA; note = chemically synthesized
aggcaggaaggaaggaagtc

SEQ ID NO: 145979-145985 - skipped (7 entries)

SEQ ID NO: 145986 - DNA, 20 bp, synthetic construct
  source 1..20: mol_type = other DNA; note = chemically synthesized
gtcaggaagccaggcagtaa

SEQ ID NO: 145987-146005 - skipped (19 entries)

SEQ ID NO: 146006 - DNA, 20 bp, synthetic construct
  source 1..20: mol_type = other DNA; note = chemically synthesized
tctttttgagtctcaggccc

SEQ ID NO: 146007-146014 - skipped (8 entries)

SEQ ID NO: 146015 - DNA, 20 bp, synthetic construct
  source 1..20: mol_type = other DNA; note = chemically synthesized
atgatgactaaatatgccat

SEQ ID NO: 146016 - DNA, 20 bp, synthetic construct
  source 1..20: mol_type = other DNA; note = chemically synthesized
tgatgactaaatatgccatt

SEQ ID NO: 146017-146022 - skipped (6 entries)

SEQ ID NO: 146023 - DNA, 20 bp, synthetic construct
  source 1..20: mol_type = other DNA; note = chemically synthesized
attagctgaagcatattcag

SEQ ID NO: 146024 - DNA, 20 bp, synthetic construct
  source 1..20: mol_type = other DNA; note = chemically synthesized
gaagcatattcagaggatga

SEQ ID NO: 146025-146026 - skipped (2 entries)

SEQ ID NO: 146027 - DNA, 20 bp, synthetic construct
  source 1..20: mol_type = other DNA; note = chemically synthesized
atattcagaggatgatggag

SEQ ID NO: 146028 - skipped

SEQ ID NO: 146029 - DNA, 20 bp, synthetic construct
  source 1..20: mol_type = other DNA; note = chemically synthesized
gatggagaggtctagcaatg

SEQ ID NO: 146030-146032 - skipped (3 entries)

SEQ ID NO: 146033 - DNA, 20 bp, synthetic construct
  source 1..20: mol_type = other DNA; note = chemically synthesized
atctgcccatgactggcgca

SEQ ID NO: 146034-146036 - skipped (3 entries)

SEQ ID NO: 146037 - DNA, 20 bp, synthetic construct
  source 1..20: mol_type = other DNA; note = chemically synthesized
gccatccctgcgccagtcat

SEQ ID NO: 146038 - DNA, 20 bp, synthetic construct
  source 1..20: mol_type = other DNA; note = chemically synthesized
tgagattatctgcccatgac

SEQ ID NO: 146039-146046 - skipped (8 entries)

SEQ ID NO: 146047 - DNA, 20 bp, synthetic construct
  source 1..20: mol_type = other DNA; note = chemically synthesized
gaccagaaatactggcctga

SEQ ID NO: 146048 - skipped

SEQ ID NO: 146049 - DNA, 20 bp, synthetic construct
  source 1..20: mol_type = other DNA; note = chemically synthesized
gaagagaagaccagaaatac

SEQ ID NO: 146050-146055 - skipped (6 entries)

SEQ ID NO: 146056 - DNA, 20 bp, synthetic construct
  source 1..20: mol_type = other DNA; note = chemically synthesized
gttcttcaggtggtgcatgc

SEQ ID NO: 146057 - skipped

SEQ ID NO: 146058 - DNA, 20 bp, synthetic construct
  source 1..20: mol_type = other DNA; note = chemically synthesized
acagatagatgttcttcagg

SEQ ID NO: 146059-146063 - skipped (5 entries)

SEQ ID NO: 146064 - DNA, 20 bp, synthetic construct
  source 1..20: mol_type = other DNA; note = chemically synthesized
acatctatctgtacactgct

SEQ ID NO: 146065 - skipped

SEQ ID NO: 146066 - DNA, 20 bp, synthetic construct
  source 1..20: mol_type = other DNA; note = chemically synthesized
tatctgtacactgctgggaa

SEQ ID NO: 146067-146072 - skipped (6 entries)

SEQ ID NO: 146073 - DNA, 20 bp, synthetic construct
  source 1..20: mol_type = other DNA; note = chemically synthesized
tacactgctgggaaagggag

SEQ ID NO: 146074-146084 - skipped (11 entries)

SEQ ID NO: 146085 - DNA, 20 bp, synthetic construct
  source 1..20: mol_type = other DNA; note = chemically synthesized
cttgcatcttgcacatgtcc

SEQ ID NO: 146086-146088 - skipped (3 entries)

SEQ ID NO: 146089 - DNA, 20 bp, synthetic construct
  source 1..20: mol_type = other DNA; note = chemically synthesized
ttgagcacctcctatactcc

SEQ ID NO: 146090-146115 - skipped (26 entries)

SEQ ID NO: 146116 - DNA, 20 bp, synthetic construct
  source 1..20: mol_type = other DNA; note = chemically synthesized
ttaacagccacccattagaa

SEQ ID NO: 146117 - DNA, 20 bp, synthetic construct
  source 1..20: mol_type = other DNA; note = chemically synthesized
ctccattcttccattctaat

SEQ ID NO: 146118 - DNA, 20 bp, synthetic construct
  source 1..20: mol_type = other DNA; note = chemically synthesized
cctccattcttccattctaa

SEQ ID NO: 146119-146125 - skipped (7 entries)

SEQ ID NO: 146126 - DNA, 20 bp, synthetic construct
  source 1..20: mol_type = other DNA; note = chemically synthesized
ctagaacacaaaacatgcct

SEQ ID NO: 146127-146138 - skipped (12 entries)

SEQ ID NO: 146139 - DNA, 20 bp, synthetic construct
  source 1..20: mol_type = other DNA; note = chemically synthesized
ttttcacgagaagataatgg

SEQ ID NO: 146140-146154 - skipped (15 entries)

SEQ ID NO: 146155 - DNA, 20 bp, synthetic construct
  source 1..20: mol_type = other DNA; note = chemically synthesized
atgtatgtgtgtggggttgg

SEQ ID NO: 146156 - DNA, 20 bp, synthetic construct
  source 1..20: mol_type = other DNA; note = chemically synthesized
aatgtatgtgtgtggggttg

SEQ ID NO: 146157 - DNA, 20 bp, synthetic construct
  source 1..20: mol_type = other DNA; note = chemically synthesized
aaatgtatgtgtgtggggtt

SEQ ID NO: 146158-146177 - skipped (20 entries)

SEQ ID NO: 146178 - DNA, 20 bp, synthetic construct
  source 1..20: mol_type = other DNA; note = chemically synthesized
tagctctgaatcagaaagca

SEQ ID NO: 146179-146225 - skipped (47 entries)

SEQ ID NO: 146226 - DNA, 20 bp, synthetic construct
  source 1..20: mol_type = other DNA; note = chemically synthesized
aaagtaatgttcactgacat

SEQ ID NO: 146227-146232 - skipped (6 entries)

SEQ ID NO: 146233 - DNA, 20 bp, synthetic construct
  source 1..20: mol_type = other DNA; note = chemically synthesized
attggaggcatcttgaggta

SEQ ID NO: 146234-146247 - skipped (14 entries)

SEQ ID NO: 146248 - DNA, 20 bp, synthetic construct
  source 1..20: mol_type = other DNA; note = chemically synthesized
tgaaaacagtaccaatctaa

SEQ ID NO: 146249 - DNA, 20 bp, synthetic construct
  source 1..20: mol_type = other DNA; note = chemically synthesized
gtaacacaattccattagat

SEQ ID NO: 146250-146261 - skipped (12 entries)

SEQ ID NO: 146262 - DNA, 20 bp, synthetic construct
  source 1..20: mol_type = other DNA; note = chemically synthesized
ctgactgtaagtacactatg

SEQ ID NO: 146263-146273 - skipped (11 entries)

SEQ ID NO: 146274 - DNA, 20 bp, synthetic construct
  source 1..20: mol_type = other DNA; note = chemically synthesized
ccatacgaatgtagaacatg

SEQ ID NO: 146275-146286 - skipped (12 entries)

SEQ ID NO: 146287 - DNA, 20 bp, synthetic construct
  source 1..20: mol_type = other DNA; note = chemically synthesized
atggagagaggtaagtctgg

SEQ ID NO: 146288-146303 - skipped (16 entries)

SEQ ID NO: 146304 - DNA, 20 bp, synthetic construct
  source 1..20: mol_type = other DNA; note = chemically synthesized
agagaatgcacaatagacat

SEQ ID NO: 146305 - DNA, 20 bp, synthetic construct
  source 1..20: mol_type = other DNA; note = chemically synthesized
gagagaatgcacaatagaca

SEQ ID NO: 146306-146311 - skipped (6 entries)

SEQ ID NO: 146312 - DNA, 20 bp, synthetic construct
  source 1..20: mol_type = other DNA; note = chemically synthesized
gaaaggacacaggtttgaaa

SEQ ID NO: 146313 - DNA, 20 bp, synthetic construct
  source 1..20: mol_type = other DNA; note = chemically synthesized
gaaagcgtatgaaaggacac

SEQ ID NO: 146314-146326 - skipped (13 entries)

SEQ ID NO: 146327 - DNA, 20 bp, synthetic construct
  source 1..20: mol_type = other DNA; note = chemically synthesized
gagaaaatgagatttttgtc

SEQ ID NO: 146328-146370 - skipped (43 entries)

SEQ ID NO: 146371 - DNA, 20 bp, synthetic construct
  source 1..20: mol_type = other DNA; note = chemically synthesized
caaaatcttgcaccactatt

SEQ ID NO: 146372 - DNA, 20 bp, synthetic construct
  source 1..20: mol_type = other DNA; note = chemically synthesized
aatcctccaaaacctaatag

SEQ ID NO: 146373-146379 - skipped (7 entries)

SEQ ID NO: 146380 - DNA, 20 bp, synthetic construct
  source 1..20: mol_type = other DNA; note = chemically synthesized
aggattttgaaagtgtctag

SEQ ID NO: 146381-146583 - skipped (203 entries)

SEQ ID NO: 146584 - DNA, 20 bp, synthetic construct
  source 1..20: mol_type = other DNA; note = chemically synthesized
atccataatctagaacgaac

SEQ ID NO: 146585-146589 - skipped (5 entries)

SEQ ID NO: 146590 - DNA, 20 bp, synthetic construct
  source 1..20: mol_type = other DNA; note = chemically synthesized
tagaattttcaatgatgttc

SEQ ID NO: 146591-146602 - skipped (12 entries)

SEQ ID NO: 146603 - DNA, 20 bp, synthetic construct
  source 1..20: mol_type = other DNA; note = chemically synthesized
agccatttcccatgctcctt

SEQ ID NO: 146604 - DNA, 20 bp, synthetic construct
  source 1..20: mol_type = other DNA; note = chemically synthesized
gttgtcatccctaaggagca

SEQ ID NO: 146605-146606 - skipped (2 entries)

SEQ ID NO: 146607 - DNA, 20 bp, synthetic construct
  source 1..20: mol_type = other DNA; note = chemically synthesized
tccctaaggagcatgggaaa

SEQ ID NO: 146608-146610 - skipped (3 entries)

SEQ ID NO: 146611 - DNA, 20 bp, synthetic construct
  source 1..20: mol_type = other DNA; note = chemically synthesized
aggatttccgccagctggag

SEQ ID NO: 146612-146620 - skipped (9 entries)

SEQ ID NO: 146621 - DNA, 20 bp, synthetic construct
  source 1..20: mol_type = other DNA; note = chemically synthesized
ttaagattaaatagggtaca

SEQ ID NO: 146622-146627 - skipped (6 entries)

SEQ ID NO: 146628 - DNA, 20 bp, synthetic construct
  source 1..20: mol_type = other DNA; note = chemically synthesized
gcccaggcatgaacagactt

SEQ ID NO: 146629-146636 - skipped (8 entries)

SEQ ID NO: 146637 - DNA, 20 bp, synthetic construct
  source 1..20: mol_type = other DNA; note = chemically synthesized
caagataggggcataagaaa

SEQ ID NO: 146638-146658 - skipped (21 entries)

SEQ ID NO: 146659 - DNA, 20 bp, synthetic construct
  source 1..20: mol_type = other DNA; note = chemically synthesized
agtctctgaggtggttagag

SEQ ID NO: 146660-146668 - skipped (9 entries)

SEQ ID NO: 146669 - DNA, 20 bp, synthetic construct
  source 1..20: mol_type = other DNA; note = chemically synthesized
tctaaccacctcagagacta

SEQ ID NO: 146670 - DNA, 20 bp, synthetic construct
  source 1..20: mol_type = other DNA; note = chemically synthesized
ctaaccacctcagagactaa

SEQ ID NO: 146671-146700 - skipped (30 entries)

SEQ ID NO: 146701 - DNA, 20 bp, synthetic construct
  source 1..20: mol_type = other DNA; note = chemically synthesized
ggttcctccagtaacagatt

SEQ ID NO: 146702 - DNA, 20 bp, synthetic construct
  source 1..20: mol_type = other DNA; note = chemically synthesized
gttcctccagtaacagattt

SEQ ID NO: 146703-146778 - skipped (76 entries)

SEQ ID NO: 146779 - DNA, 20 bp, synthetic construct
  source 1..20: mol_type = other DNA; note = chemically synthesized
ttttgttaattaaaaggtgt

SEQ ID NO: 146780-146797 - skipped (18 entries)

SEQ ID NO: 146798 - DNA, 20 bp, synthetic construct
  source 1..20: mol_type = other DNA; note = chemically synthesized
gaaaatttaattggtttcag

SEQ ID NO: 146799-146836 - skipped (38 entries)

SEQ ID NO: 146837 - DNA, 20 bp, synthetic construct
  source 1..20: mol_type = other DNA; note = chemically synthesized
tagctttgttgaatgaatgt

SEQ ID NO: 146838-146858 - skipped (21 entries)

SEQ ID NO: 146859 - DNA, 20 bp, synthetic construct
  source 1..20: mol_type = other DNA; note = chemically synthesized
cctgttgacatggaatgata

SEQ ID NO: 146860-146882 - skipped (23 entries)

SEQ ID NO: 146883 - DNA, 20 bp, synthetic construct
  source 1..20: mol_type = other DNA; note = chemically synthesized
ctccaatgttgcttacatgg

SEQ ID NO: 146884 - skipped

SEQ ID NO: 146885 - DNA, 20 bp, synthetic construct
  source 1..20: mol_type = other DNA; note = chemically synthesized
attctccaatgttgcttaca

SEQ ID NO: 146886-146981 - skipped (96 entries)

SEQ ID NO: 146982 - DNA, 20 bp, synthetic construct
  source 1..20: mol_type = other DNA; note = chemically synthesized
aagaatcactgagtaaatga

SEQ ID NO: 146983-146997 - skipped (15 entries)

SEQ ID NO: 146998 - DNA, 20 bp, synthetic construct
  source 1..20: mol_type = other DNA; note = chemically synthesized
catctaccctgaagatggtt

SEQ ID NO: 146999-147000 - skipped (2 entries)

SEQ ID NO: 147001 - DNA, 20 bp, synthetic construct
  source 1..20: mol_type = other DNA; note = chemically synthesized
cctttaccaaaccatcttca

SEQ ID NO: 147002 - DNA, 20 bp, synthetic construct
  source 1..20: mol_type = other DNA; note = chemically synthesized
gataacatctaccctgaaga

SEQ ID NO: 147003-147018 - skipped (16 entries)

SEQ ID NO: 147019 - DNA, 20 bp, synthetic construct
  source 1..20: mol_type = other DNA; note = chemically synthesized
agtggttaagcacattgtct

SEQ ID NO: 147020-147084 - skipped (65 entries)

SEQ ID NO: 147085 - DNA, 20 bp, synthetic construct
  source 1..20: mol_type = other DNA; note = chemically synthesized
catataatgttagttataga

SEQ ID NO: 147086-147105 - skipped (20 entries)

SEQ ID NO: 147106 - DNA, 20 bp, synthetic construct
  source 1..20: mol_type = other DNA; note = chemically synthesized
attctgatcctacaatgcac

SEQ ID NO: 147107-147117 - skipped (11 entries)

SEQ ID NO: 147118 - DNA, 20 bp, synthetic construct
  source 1..20: mol_type = other DNA; note = chemically synthesized
gtacatctaggagggagctc

SEQ ID NO: 147119-147120 - skipped (2 entries)

SEQ ID NO: 147121 - DNA, 20 bp, synthetic construct
  source 1..20: mol_type = other DNA; note = chemically synthesized
ttttggttgtacatctagga

SEQ ID NO: 147122-147125 - skipped (4 entries)

SEQ ID NO: 147126 - DNA, 20 bp, synthetic construct
  source 1..20: mol_type = other DNA; note = chemically synthesized
gtaatgtcaggagacatttt

SEQ ID NO: 147127-147149 - skipped (23 entries)

SEQ ID NO: 147150 - DNA, 20 bp, synthetic construct
  source 1..20: mol_type = other DNA; note = chemically synthesized
gcagctatttgagaggtggg

SEQ ID NO: 147151 - DNA, 20 bp, synthetic construct
  source 1..20: mol_type = other DNA; note = chemically synthesized
taagcagctatttgagaggt

SEQ ID NO: 147152-147206 - skipped (55 entries)

SEQ ID NO: 147207 - DNA, 20 bp, synthetic construct
  source 1..20: mol_type = other DNA; note = chemically synthesized
agatgcaagaggagaatctg

SEQ ID NO: 147208 - skipped

SEQ ID NO: 147209 - DNA, 20 bp, synthetic construct
  source 1..20: mol_type = other DNA; note = chemically synthesized
gacaaaagtgtagatgcaag

SEQ ID NO: 147210-147228 - skipped (19 entries)

SEQ ID NO: 147229 - DNA, 20 bp, synthetic construct
  source 1..20: mol_type = other DNA; note = chemically synthesized
gtttctccactccttgaata

SEQ ID NO: 147230 - DNA, 20 bp, synthetic construct
  source 1..20: mol_type = other DNA; note = chemically synthesized
acttgaccaatccatattca

SEQ ID NO: 147231 - skipped

SEQ ID NO: 147232 - DNA, 20 bp, synthetic construct
  source 1..20: mol_type = other DNA; note = chemically synthesized
tccactccttgaatatggat

SEQ ID NO: 147233 - skipped

SEQ ID NO: 147234 - DNA, 20 bp, synthetic construct
  source 1..20: mol_type = other DNA; note = chemically synthesized
attggtcaagtcacttgttt

SEQ ID NO: 147235-147261 - skipped (27 entries)

SEQ ID NO: 147262 - DNA, 20 bp, synthetic construct
  source 1..20: mol_type = other DNA; note = chemically synthesized
cttgcctgtaattattcatc

SEQ ID NO: 147263-147269 - skipped (7 entries)

SEQ ID NO: 147270 - DNA, 20 bp, synthetic construct
  source 1..20: mol_type = other DNA; note = chemically synthesized
ggttataagttgagacggtg

SEQ ID NO: 147271-147274 - skipped (4 entries)

SEQ ID NO: 147275 - DNA, 20 bp, synthetic construct
  source 1..20: mol_type = other DNA; note = chemically synthesized
atatgtctggtataactttt

SEQ ID NO: 147276-147298 - skipped (23 entries)

SEQ ID NO: 147299 - DNA, 20 bp, synthetic construct
  source 1..20: mol_type = other DNA; note = chemically synthesized
atgattcttgattctgcttg

SEQ ID NO: 147300-147319 - skipped (20 entries)

SEQ ID NO: 147320 - DNA, 20 bp, synthetic construct
  source 1..20: mol_type = other DNA; note = chemically synthesized
tttgcgtacaagtgtttaac

SEQ ID NO: 147321-147337 - skipped (17 entries)

SEQ ID NO: 147338 - DNA, 20 bp, synthetic construct
  source 1..20: mol_type = other DNA; note = chemically synthesized
tccagctgtgttctctctgc

SEQ ID NO: 147339-147384 - skipped (46 entries)

SEQ ID NO: 147385 - DNA, 20 bp, synthetic construct
  source 1..20: mol_type = other DNA; note = chemically synthesized
aataataagagccaagaagt

SEQ ID NO: 147386 - DNA, 20 bp, synthetic construct
  source 1..20: mol_type = other DNA; note = chemically synthesized
gcactgggctgcctacttct

SEQ ID NO: 147387-147394 - skipped (8 entries)

SEQ ID NO: 147395 - DNA, 20 bp, synthetic construct
  source 1..20: mol_type = other DNA; note = chemically synthesized
cagcccagtgcagaagacaa

SEQ ID NO: 147396-147401 - skipped (6 entries)

SEQ ID NO: 147402 - DNA, 20 bp, synthetic construct
  source 1..20: mol_type = other DNA; note = chemically synthesized
accacccttcatcaatagcg

SEQ ID NO: 147403-147406 - skipped (4 entries)

SEQ ID NO: 147407 - DNA, 20 bp, synthetic construct
  source 1..20: mol_type = other DNA; note = chemically synthesized
accacgctattgatgaaggg

SEQ ID NO: 147408-147411 - skipped (4 entries)

SEQ ID NO: 147412 - DNA, 20 bp, synthetic construct
  source 1..20: mol_type = other DNA; note = chemically synthesized
tctagctggttatactcaaa

SEQ ID NO: 147413-147459 - skipped (47 entries)

SEQ ID NO: 147460 - DNA, 20 bp, synthetic construct
  source 1..20: mol_type = other DNA; note = chemically synthesized
gtctaaatctcttatttgtt

SEQ ID NO: 147461-147476 - skipped (16 entries)

SEQ ID NO: 147477 - DNA, 20 bp, synthetic construct
  source 1..20: mol_type = other DNA; note = chemically synthesized
aagatcctctaccatgtgtc

SEQ ID NO: 147478 - DNA, 20 bp, synthetic construct
  source 1..20: mol_type = other DNA; note = chemically synthesized
gcttgtgagggcctgacaca

SEQ ID NO: 147479 - skipped

SEQ ID NO: 147480 - DNA, 20 bp, synthetic construct
  source 1..20: mol_type = other DNA; note = chemically synthesized
ctggtggatgaggcttgtga

SEQ ID NO: 147481-147483 - skipped (3 entries)

SEQ ID NO: 147484 - DNA, 20 bp, synthetic construct
  source 1..20: mol_type = other DNA; note = chemically synthesized
atcatctcctctggtggatg

SEQ ID NO: 147485-147488 - skipped (4 entries)

SEQ ID NO: 147489 - DNA, 20 bp, synthetic construct
  source 1..20: mol_type = other DNA; note = chemically synthesized
tagcttatcatctcctctgg

SEQ ID NO: 147490-147574 - skipped (85 entries)

SEQ ID NO: 147575 - DNA, 20 bp, synthetic construct
  source 1..20: mol_type = other DNA; note = chemically synthesized
cataccactctggtgtggat

SEQ ID NO: 147576-147619 - skipped (44 entries)

SEQ ID NO: 147620 - DNA, 20 bp, synthetic construct
  source 1..20: mol_type = other DNA; note = chemically synthesized
tactcaacatcgtcaatcat

SEQ ID NO: 147621 - DNA, 20 bp, synthetic construct
  source 1..20: mol_type = other DNA; note = chemically synthesized
actcaacatcgtcaatcatc

SEQ ID NO: 147622 - DNA, 20 bp, synthetic construct
  source 1..20: mol_type = other DNA; note = chemically synthesized
ctcaacatcgtcaatcatcg

SEQ ID NO: 147623-147647 - skipped (25 entries)

SEQ ID NO: 147648 - DNA, 20 bp, synthetic construct
  source 1..20: mol_type = other DNA; note = chemically synthesized
gtgaaaaggtgtagccacta

SEQ ID NO: 147649-147665 - skipped (17 entries)

SEQ ID NO: 147666 - DNA, 20 bp, synthetic construct
  source 1..20: mol_type = other DNA; note = chemically synthesized
ctaaccgtacacccagaaat

SEQ ID NO: 147667 - skipped

SEQ ID NO: 147668 - DNA, 20 bp, synthetic construct
  source 1..20: mol_type = other DNA; note = chemically synthesized
caatcccatttctgggtgta

SEQ ID NO: 147669-147671 - skipped (3 entries)

SEQ ID NO: 147672 - DNA, 20 bp, synthetic construct
  source 1..20: mol_type = other DNA; note = chemically synthesized
aagttagaccttagtaagtt

SEQ ID NO: 147673-147674 - skipped (2 entries)

SEQ ID NO: 147675 - DNA, 20 bp, synthetic construct
  source 1..20: mol_type = other DNA; note = chemically synthesized
ggttagtccccaacttacta

SEQ ID NO: 147676-147698 - skipped (23 entries)

SEQ ID NO: 147699 - DNA, 20 bp, synthetic construct
  source 1..20: mol_type = other DNA; note = chemically synthesized
atactctcttctgacatatt

SEQ ID NO: 147700-147722 - skipped (23 entries)

SEQ ID NO: 147723 - DNA, 20 bp, synthetic construct
  source 1..20: mol_type = other DNA; note = chemically synthesized
gcaatgatgtttggtagctt

SEQ ID NO: 147724-147731 - skipped (8 entries)

SEQ ID NO: 147732 - DNA, 20 bp, synthetic construct
  source 1..20: mol_type = other DNA; note = chemically synthesized
gatgctcattgatttacact

SEQ ID NO: 147733-147743 - skipped (11 entries)

SEQ ID NO: 147744 - DNA, 20 bp, synthetic construct
  source 1..20: mol_type = other DNA; note = chemically synthesized
ttgcacactcatattaactg

SEQ ID NO: 147745-147761 - skipped (17 entries)

SEQ ID NO: 147762 - DNA, 20 bp, synthetic construct
  source 1..20: mol_type = other DNA; note = chemically synthesized
cccatgttgtagcataggaa

SEQ ID NO: 147763-147765 - skipped (3 entries)

SEQ ID NO: 147766 - DNA, 20 bp, synthetic construct
  source 1..20: mol_type = other DNA; note = chemically synthesized
tcctttcctatgctacaaca

SEQ ID NO: 147767 - DNA, 20 bp, synthetic construct
  source 1..20: mol_type = other DNA; note = chemically synthesized
cctttcctatgctacaacat

SEQ ID NO: 147768-147799 - skipped (32 entries)

SEQ ID NO: 147800 - DNA, 20 bp, synthetic construct
  source 1..20: mol_type = other DNA; note = chemically synthesized
attgccagtgctggggtaca

SEQ ID NO: 147801-147802 - skipped (2 entries)

SEQ ID NO: 147803 - DNA, 20 bp, synthetic construct
  source 1..20: mol_type = other DNA; note = chemically synthesized
tgctggggtacagggagcaa

SEQ ID NO: 147804-147806 - skipped (3 entries)

SEQ ID NO: 147807 - DNA, 20 bp, synthetic construct
  source 1..20: mol_type = other DNA; note = chemically synthesized
gagcaatgggagctcttcag

SEQ ID NO: 147808 - DNA, 20 bp, synthetic construct
  source 1..20: mol_type = other DNA; note = chemically synthesized
agcaatgggagctcttcagt

SEQ ID NO: 147809-148019 - skipped (211 entries)

SEQ ID NO: 148020 - DNA, 20 bp, synthetic construct
  source 1..20: mol_type = other DNA; note = chemically synthesized
taaaagggaattcatagacc

SEQ ID NO: 148021-148050 - skipped (30 entries)

SEQ ID NO: 148051 - DNA, 20 bp, synthetic construct
  source 1..20: mol_type = other DNA; note = chemically synthesized
attgcaatgaggatgcaagt

SEQ ID NO: 148052-148057 - skipped (6 entries)

SEQ ID NO: 148058 - DNA, 20 bp, synthetic construct
  source 1..20: mol_type = other DNA; note = chemically synthesized
tcctcattgcaatatttgtg

SEQ ID NO: 148059-148064 - skipped (6 entries)

SEQ ID NO: 148065 - DNA, 20 bp, synthetic construct
  source 1..20: mol_type = other DNA; note = chemically synthesized
atgccagtgcctctctgtag

SEQ ID NO: 148066-148071 - skipped (6 entries)

SEQ ID NO: 148072 - DNA, 20 bp, synthetic construct
  source 1..20: mol_type = other DNA; note = chemically synthesized
gcttcatcaagatcctcttc

SEQ ID NO: 148073 - skipped

SEQ ID NO: 148074 - DNA, 20 bp, synthetic construct
  source 1..20: mol_type = other DNA; note = chemically synthesized
gggtgcatcgactccagaag

SEQ ID NO: 148075-148082 - skipped (8 entries)

SEQ ID NO: 148083 - DNA, 20 bp, synthetic construct
  source 1..20: mol_type = other DNA; note = chemically synthesized
gcaaccacaccacaaatact

SEQ ID NO: 148084-148094 - skipped (11 entries)

SEQ ID NO: 148095 - DNA, 20 bp, synthetic construct
  source 1..20: mol_type = other DNA; note = chemically synthesized
atcacagctgcatttctccc

SEQ ID NO: 148096 - skipped

SEQ ID NO: 148097 - DNA, 20 bp, synthetic construct
  source 1..20: mol_type = other DNA; note = chemically synthesized
ctagccaagagcaggcacca

SEQ ID NO: 148098 - DNA, 20 bp, synthetic construct
  source 1..20: mol_type = other DNA; note = chemically synthesized
actagccaagagcaggcacc

SEQ ID NO: 148099-148100 - skipped (2 entries)

SEQ ID NO: 148101 - DNA, 20 bp, synthetic construct
  source 1..20: mol_type = other DNA; note = chemically synthesized
tctttgcactagccaagagc

SEQ ID NO: 148102-148122 - skipped (21 entries)

SEQ ID NO: 148123 - DNA, 20 bp, synthetic construct
  source 1..20: mol_type = other DNA; note = chemically synthesized
tgtgacagggacactggagc

SEQ ID NO: 148124-148125 - skipped (2 entries)

SEQ ID NO: 148126 - DNA, 20 bp, synthetic construct
  source 1..20: mol_type = other DNA; note = chemically synthesized
gctccagtgtccctgtcaca

SEQ ID NO: 148127 - DNA, 20 bp, synthetic construct
  source 1..20: mol_type = other DNA; note = chemically synthesized
aggcttcagcccatgtgaca

SEQ ID NO: 148128 - DNA, 20 bp, synthetic construct
  source 1..20: mol_type = other DNA; note = chemically synthesized
ctccagtgtccctgtcacat

SEQ ID NO: 148129 - DNA, 20 bp, synthetic construct
  source 1..20: mol_type = other DNA; note = chemically synthesized
gaggcttcagcccatgtgac

SEQ ID NO: 148130-148137 - skipped (8 entries)

SEQ ID NO: 148138 - DNA, 20 bp, synthetic construct
  source 1..20: mol_type = other DNA; note = chemically synthesized
cctcagtagcaactgcagtg

SEQ ID NO: 148139-148145 - skipped (7 entries)

SEQ ID NO: 148146 - DNA, 20 bp, synthetic construct
  source 1..20: mol_type = other DNA; note = chemically synthesized
ggaagtgaaggaggcagtat

SEQ ID NO: 148147-148149 - skipped (3 entries)

SEQ ID NO: 148150 - DNA, 20 bp, synthetic construct
  source 1..20: mol_type = other DNA; note = chemically synthesized
tgctatttataaggaagtga

SEQ ID NO: 148151-148166 - skipped (16 entries)

SEQ ID NO: 148167 - DNA, 20 bp, synthetic construct
  source 1..20: mol_type = other DNA; note = chemically synthesized
gtgtcagagatgagattcct

SEQ ID NO: 148168-148170 - skipped (3 entries)

SEQ ID NO: 148171 - DNA, 20 bp, synthetic construct
  source 1..20: mol_type = other DNA; note = chemically synthesized
catctctgacaccgtatctc

SEQ ID NO: 148172 - DNA, 20 bp, synthetic construct
  source 1..20: mol_type = other DNA; note = chemically synthesized
acgtaaatagaccagagata

SEQ ID NO: 148173-148212 - skipped (40 entries)

SEQ ID NO: 148213 - DNA, 20 bp, synthetic construct
  source 1..20: mol_type = other DNA; note = chemically synthesized
atcaggctggccttgaactc

SEQ ID NO: 148214-148312 - skipped (99 entries)

SEQ ID NO: 148313 - DNA, 20 bp, synthetic construct
  source 1..20: mol_type = other DNA; note = chemically synthesized
ttccaaggtcattatgaaga

SEQ ID NO: 148314-148355 - skipped (42 entries)

SEQ ID NO: 148356 - DNA, 20 bp, synthetic construct
  source 1..20: mol_type = other DNA; note = chemically synthesized
tacaaaagagatcaaaatca

SEQ ID NO: 148357 - DNA, 20 bp, synthetic construct
  source 1..20: mol_type = other DNA; note = chemically synthesized
acaaaagagatcaaaatcaa

SEQ ID NO: 148358-148371 - skipped (14 entries)

SEQ ID NO: 148372 - DNA, 20 bp, synthetic construct
  source 1..20: mol_type = other DNA; note = chemically synthesized
agaatttgagatggtttggc

SEQ ID NO: 148373 - skipped

SEQ ID NO: 148374 - DNA, 20 bp, synthetic construct
  source 1..20: mol_type = other DNA; note = chemically synthesized
aaaaagaatttgagatggtt

SEQ ID NO: 148375-148381 - skipped (7 entries)

SEQ ID NO: 148382 - DNA, 20 bp, synthetic construct
  source 1..20: mol_type = other DNA; note = chemically synthesized
taaataaaacatggtttcag

SEQ ID NO: 148383-148410 - skipped (28 entries)

SEQ ID NO: 148411 - DNA, 20 bp, synthetic construct
  source 1..20: mol_type = other DNA; note = chemically synthesized
cttcagaaaccatttactgt

SEQ ID NO: 148412 - skipped

SEQ ID NO: 148413 - DNA, 20 bp, synthetic construct
  source 1..20: mol_type = other DNA; note = chemically synthesized
acttcagaaaccatttactg

SEQ ID NO: 148414-148416 - skipped (3 entries)

SEQ ID NO: 148417 - DNA, 20 bp, synthetic construct
  source 1..20: mol_type = other DNA; note = chemically synthesized
tctttctgaataaacagagt

SEQ ID NO: 148418-148436 - skipped (19 entries)

SEQ ID NO: 148437 - DNA, 20 bp, synthetic construct
  source 1..20: mol_type = other DNA; note = chemically synthesized
aggggaaatcccatcagatc

SEQ ID NO: 148438-148547 - skipped (110 entries)

SEQ ID NO: 148548 - DNA, 20 bp, synthetic construct
  source 1..20: mol_type = other DNA; note = chemically synthesized
aagatgacgtgagtctctta

SEQ ID NO: 148549-148557 - skipped (9 entries)

SEQ ID NO: 148558 - DNA, 20 bp, synthetic construct
  source 1..20: mol_type = other DNA; note = chemically synthesized
tcaccagtctaaagatagag

SEQ ID NO: 148559-148567 - skipped (9 entries)

SEQ ID NO: 148568 - DNA, 20 bp, synthetic construct
  source 1..20: mol_type = other DNA; note = chemically synthesized
cattcaaagtaaatattgat

SEQ ID NO: 148569-148733 - skipped (165 entries)

SEQ ID NO: 148734 - DNA, 20 bp, synthetic construct
  source 1..20: mol_type = other DNA; note = chemically synthesized
ccacagaaaatatatacatt

SEQ ID NO: 148735-148758 - skipped (24 entries)

SEQ ID NO: 148759 - DNA, 20 bp, synthetic construct
  source 1..20: mol_type = other DNA; note = chemically synthesized
agtagggttagtttactact

SEQ ID NO: 148760 - DNA, 20 bp, synthetic construct
  source 1..20: mol_type = other DNA; note = chemically synthesized
gtagggttagtttactactg

SEQ ID NO: 148761-148772 - skipped (12 entries)

SEQ ID NO: 148773 - DNA, 20 bp, synthetic construct
  source 1..20: mol_type = other DNA; note = chemically synthesized
gacgtaaaagtggaattgaa

SEQ ID NO: 148774 - DNA, 20 bp, synthetic construct
  source 1..20: mol_type = other DNA; note = chemically synthesized
aagtggaattgaagggcata

SEQ ID NO: 148775-148788 - skipped (14 entries)

SEQ ID NO: 148789 - DNA, 20 bp, synthetic construct
  source 1..20: mol_type = other DNA; note = chemically synthesized
aatcttcccctattgacaat

SEQ ID NO: 148790-148791 - skipped (2 entries)

SEQ ID NO: 148792 - DNA, 20 bp, synthetic construct
  source 1..20: mol_type = other DNA; note = chemically synthesized
ctattgacaatgggggcctg

SEQ ID NO: 148793-148825 - skipped (33 entries)

SEQ ID NO: 148826 - DNA, 20 bp, synthetic construct
  source 1..20: mol_type = other DNA; note = chemically synthesized
acttgtgaagatcttcagga

SEQ ID NO: 148827-148836 - skipped (10 entries)

SEQ ID NO: 148837 - DNA, 20 bp, synthetic construct
  source 1..20: mol_type = other DNA; note = chemically synthesized
acatctggtaatattaagtt

SEQ ID NO: 148838-148851 - skipped (14 entries)

SEQ ID NO: 148852 - DNA, 20 bp, synthetic construct
  source 1..20: mol_type = other DNA; note = chemically synthesized
ggctatggtttgggggtttt

SEQ ID NO: 148853-148866 - skipped (14 entries)

SEQ ID NO: 148867 - DNA, 20 bp, synthetic construct
  source 1..20: mol_type = other DNA; note = chemically synthesized
tcaaatgaggactagatccc

SEQ ID NO: 148868-148899 - skipped (32 entries)

SEQ ID NO: 148900 - DNA, 20 bp, synthetic construct
  source 1..20: mol_type = other DNA; note = chemically synthesized
aaatgtctactacatgtttg

SEQ ID NO: 148901-148921 - skipped (21 entries)

SEQ ID NO: 148922 - DNA, 20 bp, synthetic construct
  source 1..20: mol_type = other DNA; note = chemically synthesized
tttagctatatccagcacac

SEQ ID NO: 148923 - DNA, 20 bp, synthetic construct
  source 1..20: mol_type = other DNA; note = chemically synthesized
gaagttctcaacctgtgtgc

SEQ ID NO: 148924-148977 - skipped (54 entries)

SEQ ID NO: 148978 - DNA, 20 bp, synthetic construct
  source 1..20: mol_type = other DNA; note = chemically synthesized
caggggctacagatatgtaa

SEQ ID NO: 148979-148983 - skipped (5 entries)

SEQ ID NO: 148984 - DNA, 20 bp, synthetic construct
  source 1..20: mol_type = other DNA; note = chemically synthesized
tgaagatagatattcatgtc

SEQ ID NO: 148985-148995 - skipped (11 entries)

SEQ ID NO: 148996 - DNA, 20 bp, synthetic construct
  source 1..20: mol_type = other DNA; note = chemically synthesized
acatctgtgatgatactggt

SEQ ID NO: 148997 - skipped

SEQ ID NO: 148998 - DNA, 20 bp, synthetic construct
  source 1..20: mol_type = other DNA; note = chemically synthesized
tgtgatgatactggtaggat

SEQ ID NO: 148999 - skipped

SEQ ID NO: 149000 - DNA, 20 bp, synthetic construct
  source 1..20: mol_type = other DNA; note = chemically synthesized
gtgatgatactggtaggata

SEQ ID NO: 149001 - DNA, 20 bp, synthetic construct
  source 1..20: mol_type = other DNA; note = chemically synthesized
tgatactggtaggataggga

SEQ ID NO: 149002-149005 - skipped (4 entries)

SEQ ID NO: 149006 - DNA, 20 bp, synthetic construct
  source 1..20: mol_type = other DNA; note = chemically synthesized
tagggatgggggcaaaacaa

SEQ ID NO: 149007-149009 - skipped (3 entries)

SEQ ID NO: 149010 - DNA, 20 bp, synthetic construct
  source 1..20: mol_type = other DNA; note = chemically synthesized
gtggaagagaattcaggtat

SEQ ID NO: 149011 - DNA, 20 bp, synthetic construct
  source 1..20: mol_type = other DNA; note = chemically synthesized
agtaaagtggaagagaattc

SEQ ID NO: 149012-149057 - skipped (46 entries)

SEQ ID NO: 149058 - DNA, 20 bp, synthetic construct
  source 1..20: mol_type = other DNA; note = chemically synthesized
gtttggaaagaagactgtat

SEQ ID NO: 149059-149063 - skipped (5 entries)

SEQ ID NO: 149064 - DNA, 20 bp, synthetic construct
  source 1..20: mol_type = other DNA; note = chemically synthesized
tgtaagactgaaatcaacat

SEQ ID NO: 149065-149112 - skipped (48 entries)

SEQ ID NO: 149113 - DNA, 20 bp, synthetic construct
  source 1..20: mol_type = other DNA; note = chemically synthesized
gtactgggaaactactgggc

SEQ ID NO: 149114-149120 - skipped (7 entries)

SEQ ID NO: 149121 - DNA, 20 bp, synthetic construct
  source 1..20: mol_type = other DNA; note = chemically synthesized
ccagtacatgaaattagtac

SEQ ID NO: 149122 - skipped

SEQ ID NO: 149123 - DNA, 20 bp, synthetic construct
  source 1..20: mol_type = other DNA; note = chemically synthesized
gtacatgaaattagtactgg

SEQ ID NO: 149124-149127 - skipped (4 entries)

SEQ ID NO: 149128 - DNA, 20 bp, synthetic construct
  source 1..20: mol_type = other DNA; note = chemically synthesized
ttgggtggttctaacatgta

SEQ ID NO: 149129-149130 - skipped (2 entries)

SEQ ID NO: 149131 - DNA, 20 bp, synthetic construct
  source 1..20: mol_type = other DNA; note = chemically synthesized
attgatcctattgggtaatt

SEQ ID NO: 149132-149220 - skipped (89 entries)

SEQ ID NO: 149221 - DNA, 20 bp, synthetic construct
  source 1..20: mol_type = other DNA; note = chemically synthesized
cagtgaggagttgagagcag

SEQ ID NO: 149222-149227 - skipped (6 entries)

SEQ ID NO: 149228 - DNA, 20 bp, synthetic construct
  source 1..20: mol_type = other DNA; note = chemically synthesized
tgctctcaactcctcactgg

SEQ ID NO: 149229 - DNA, 20 bp, synthetic construct
  source 1..20: mol_type = other DNA; note = chemically synthesized
gctctcaactcctcactgga

SEQ ID NO: 149230 - DNA, 20 bp, synthetic construct
  source 1..20: mol_type = other DNA; note = chemically synthesized
cttgcacactccctccagtg

SEQ ID NO: 149231-149237 - skipped (7 entries)

SEQ ID NO: 149238 - DNA, 20 bp, synthetic construct
  source 1..20: mol_type = other DNA; note = chemically synthesized
agtgtgcaagcaaacgaggt

SEQ ID NO: 149239-149247 - skipped (9 entries)

SEQ ID NO: 149248 - DNA, 20 bp, synthetic construct
  source 1..20: mol_type = other DNA; note = chemically synthesized
tgagcactggagcagcatct

SEQ ID NO: 149249-149309 - skipped (61 entries)

SEQ ID NO: 149310 - DNA, 20 bp, synthetic construct
  source 1..20: mol_type = other DNA; note = chemically synthesized
tagatgctggacaagagctc

SEQ ID NO: 149311-149408 - skipped (98 entries)

SEQ ID NO: 149409 - DNA, 20 bp, synthetic construct
  source 1..20: mol_type = other DNA; note = chemically synthesized
gggtggggtggggccatggg

SEQ ID NO: 149410-149423 - skipped (14 entries)

SEQ ID NO: 149424 - DNA, 20 bp, synthetic construct
  source 1..20: mol_type = other DNA; note = chemically synthesized
taagttcccactttgagctg

SEQ ID NO: 149425-149439 - skipped (15 entries)

SEQ ID NO: 149440 - DNA, 20 bp, synthetic construct
  source 1..20: mol_type = other DNA; note = chemically synthesized
tgagggtggggttttcgctg

SEQ ID NO: 149441-149469 - skipped (29 entries)

SEQ ID NO: 149470 - DNA, 20 bp, synthetic construct
  source 1..20: mol_type = other DNA; note = chemically synthesized
aggtgctcctcaacgtacaa

SEQ ID NO: 149471-149486 - skipped (16 entries)

SEQ ID NO: 149487 - DNA, 20 bp, synthetic construct
  source 1..20: mol_type = other DNA; note = chemically synthesized
gaccatgttgaaggtaggct

SEQ ID NO: 149488-149490 - skipped (3 entries)

SEQ ID NO: 149491 - DNA, 20 bp, synthetic construct
  source 1..20: mol_type = other DNA; note = chemically synthesized
agcctagcctaccttcaaca

SEQ ID NO: 149492 - DNA, 20 bp, synthetic construct
  source 1..20: mol_type = other DNA; note = chemically synthesized
aagtgttctgaccatgttga

SEQ ID NO: 149493-149521 - skipped (29 entries)

SEQ ID NO: 149522 - DNA, 20 bp, synthetic construct
  source 1..20: mol_type = other DNA; note = chemically synthesized
gatttacaatggttcggctt

SEQ ID NO: 149523-149528 - skipped (6 entries)

SEQ ID NO: 149529 - DNA, 20 bp, synthetic construct
  source 1..20: mol_type = other DNA; note = chemically synthesized
gaaataaagaaatatacaga

SEQ ID NO: 149530-149537 - skipped (8 entries)

SEQ ID NO: 149538 - DNA, 20 bp, synthetic construct
  source 1..20: mol_type = other DNA; note = chemically synthesized
caattatctccttttgtcaa

SEQ ID NO: 149539-149568 - skipped (30 entries)

SEQ ID NO: 149569 - DNA, 20 bp, synthetic construct
  source 1..20: mol_type = other DNA; note = chemically synthesized
aaatgctaagaaatttagat

SEQ ID NO: 149570-149573 - skipped (4 entries)

SEQ ID NO: 149574 - DNA, 20 bp, synthetic construct
  source 1..20: mol_type = other DNA; note = chemically synthesized
ttttcaagatatagaattgt

SEQ ID NO: 149575-149583 - skipped (9 entries)

SEQ ID NO: 149584 - DNA, 20 bp, synthetic construct
  source 1..20: mol_type = other DNA; note = chemically synthesized
agactacagcacagttggac

SEQ ID NO: 149585-149587 - skipped (3 entries)

SEQ ID NO: 149588 - DNA, 20 bp, synthetic construct
  source 1..20: mol_type = other DNA; note = chemically synthesized
gactggtttagactaaaact

SEQ ID NO: 149589-149599 - skipped (11 entries)

SEQ ID NO: 149600 - DNA, 20 bp, synthetic construct
  source 1..20: mol_type = other DNA; note = chemically synthesized
tagtatacgtctaaaatctt

SEQ ID NO: 149601-149623 - skipped (23 entries)

SEQ ID NO: 149624 - DNA, 20 bp, synthetic construct
  source 1..20: mol_type = other DNA; note = chemically synthesized
caataatagtatattactat

SEQ ID NO: 149625-149630 - skipped (6 entries)

SEQ ID NO: 149631 - DNA, 20 bp, synthetic construct
  source 1..20: mol_type = other DNA; note = chemically synthesized
gatgccatgaaacattcctg

SEQ ID NO: 149632 - DNA, 20 bp, synthetic construct
  source 1..20: mol_type = other DNA; note = chemically synthesized
atcatcccgatcacagcccc

SEQ ID NO: 149633-149638 - skipped (6 entries)

SEQ ID NO: 149639 - DNA, 20 bp, synthetic construct
  source 1..20: mol_type = other DNA; note = chemically synthesized
ctgtgatcgggatgattgag

SEQ ID NO: 149640-149647 - skipped (8 entries)

SEQ ID NO: 149648 - DNA, 20 bp, synthetic construct
  source 1..20: mol_type = other DNA; note = chemically synthesized
aagtggatgtgaccagggaa

SEQ ID NO: 149649 - DNA, 20 bp, synthetic construct
  source 1..20: mol_type = other DNA; note = chemically synthesized
caaacagctaagccattccc

SEQ ID NO: 149650-149701 - skipped (52 entries)

SEQ ID NO: 149702 - DNA, 20 bp, synthetic construct
  source 1..20: mol_type = other DNA; note = chemically synthesized
ccaaatgctgaatagctgca

SEQ ID NO: 149703-149705 - skipped (3 entries)

SEQ ID NO: 149706 - DNA, 20 bp, synthetic construct
  source 1..20: mol_type = other DNA; note = chemically synthesized
atcataatacaatattgtca

SEQ ID NO: 149707-149741 - skipped (35 entries)

SEQ ID NO: 149742 - DNA, 20 bp, synthetic construct
  source 1..20: mol_type = other DNA; note = chemically synthesized
aaggatcagaaacgaaattt

SEQ ID NO: 149743-149744 - skipped (2 entries)

SEQ ID NO: 149745 - DNA, 20 bp, synthetic construct
  source 1..20: mol_type = other DNA; note = chemically synthesized
atttagtcattcacattggg

SEQ ID NO: 149746-149771 - skipped (26 entries)

SEQ ID NO: 149772 - DNA, 20 bp, synthetic construct
  source 1..20: mol_type = other DNA; note = chemically synthesized
tcactccattggggtgacac

SEQ ID NO: 149773-149786 - skipped (14 entries)

SEQ ID NO: 149787 - DNA, 20 bp, synthetic construct
  source 1..20: mol_type = other DNA; note = chemically synthesized
agaaagcagaatttcagagt

SEQ ID NO: 149788-149822 - skipped (35 entries)

SEQ ID NO: 149823 - DNA, 20 bp, synthetic construct
  source 1..20: mol_type = other DNA; note = chemically synthesized
taatctcatcctcttggttc

SEQ ID NO: 149824-149856 - skipped (33 entries)

SEQ ID NO: 149857 - DNA, 20 bp, synthetic construct
  source 1..20: mol_type = other DNA; note = chemically synthesized
gatgactgccagcaacaaat

SEQ ID NO: 149858 - DNA, 20 bp, synthetic construct
  source 1..20: mol_type = other DNA; note = chemically synthesized
agatgactgccagcaacaaa

SEQ ID NO: 149859-149862 - skipped (4 entries)

SEQ ID NO: 149863 - DNA, 20 bp, synthetic construct
  source 1..20: mol_type = other DNA; note = chemically synthesized
ctggcagtcatcttggaacc

SEQ ID NO: 149864-149865 - skipped (2 entries)

SEQ ID NO: 149866 - DNA, 20 bp, synthetic construct
  source 1..20: mol_type = other DNA; note = chemically synthesized
gcagtcatcttggaacctgg

SEQ ID NO: 149867 - skipped

SEQ ID NO: 149868 - DNA, 20 bp, synthetic construct
  source 1..20: mol_type = other DNA; note = chemically synthesized
ctcctcactagttgccctcc

SEQ ID NO: 149869-149892 - skipped (24 entries)

SEQ ID NO: 149893 - DNA, 20 bp, synthetic construct
  source 1..20: mol_type = other DNA; note = chemically synthesized
agctctgcttgtacttcatc

SEQ ID NO: 149894-149899 - skipped (6 entries)

SEQ ID NO: 149900 - DNA, 20 bp, synthetic construct
  source 1..20: mol_type = other DNA; note = chemically synthesized
tcacataactggaagttcag

SEQ ID NO: 149901-149949 - skipped (49 entries)

SEQ ID NO: 149950 - DNA, 20 bp, synthetic construct
  source 1..20: mol_type = other DNA; note = chemically synthesized
ggaggactaagtaggaaaaa

SEQ ID NO: 149951-149991 - skipped (41 entries)

SEQ ID NO: 149992 - DNA, 20 bp, synthetic construct
  source 1..20: mol_type = other DNA; note = chemically synthesized
tggtacctactagtctatct

SEQ ID NO: 149993-150052 - skipped (60 entries)

SEQ ID NO: 150053 - DNA, 20 bp, synthetic construct
  source 1..20: mol_type = other DNA; note = chemically synthesized
aaggattggtaatttatcgt

SEQ ID NO: 150054-150103 - skipped (50 entries)

SEQ ID NO: 150104 - DNA, 20 bp, synthetic construct
  source 1..20: mol_type = other DNA; note = chemically synthesized
cctgaactagagataatcat

SEQ ID NO: 150105-150152 - skipped (48 entries)

SEQ ID NO: 150153 - DNA, 20 bp, synthetic construct
  source 1..20: mol_type = other DNA; note = chemically synthesized
atggcttaatgcccttcctg

SEQ ID NO: 150154 - DNA, 20 bp, synthetic construct
  source 1..20: mol_type = other DNA; note = chemically synthesized
tggcttaatgcccttcctgg

SEQ ID NO: 150155 - DNA, 20 bp, synthetic construct
  source 1..20: mol_type = other DNA; note = chemically synthesized
actcaacctgcccccaggaa

SEQ ID NO: 150156 - DNA, 20 bp, synthetic construct
  source 1..20: mol_type = other DNA; note = chemically synthesized
cactcaacctgcccccagga

SEQ ID NO: 150157-150158 - skipped (2 entries)

SEQ ID NO: 150159 - DNA, 20 bp, synthetic construct
  source 1..20: mol_type = other DNA; note = chemically synthesized
ttaatgcccttcctgggggc

SEQ ID NO: 150160 - DNA, 20 bp, synthetic construct
  source 1..20: mol_type = other DNA; note = chemically synthesized
cagtcactcaacctgccccc

SEQ ID NO: 150161-150265 - skipped (105 entries)

SEQ ID NO: 150266 - DNA, 20 bp, synthetic construct
  source 1..20: mol_type = other DNA; note = chemically synthesized
gagcaatgcagactaggaat

SEQ ID NO: 150267-150289 - skipped (23 entries)

SEQ ID NO: 150290 - DNA, 20 bp, synthetic construct
  source 1..20: mol_type = other DNA; note = chemically synthesized
tggtttttcagtgatctctg

SEQ ID NO: 150291-150310 - skipped (20 entries)

SEQ ID NO: 150311 - DNA, 20 bp, synthetic construct
  source 1..20: mol_type = other DNA; note = chemically synthesized
cctttaaatagtcttaccca

SEQ ID NO: 150312-150362 - skipped (51 entries)

SEQ ID NO: 150363 - DNA, 20 bp, synthetic construct
  source 1..20: mol_type = other DNA; note = chemically synthesized
tactgaagagtacatgtgac

SEQ ID NO: 150364-150399 - skipped (36 entries)

SEQ ID NO: 150400 - DNA, 20 bp, synthetic construct
  source 1..20: mol_type = other DNA; note = chemically synthesized
aagaattggaagtgaccaac

SEQ ID NO: 150401-150414 - skipped (14 entries)

SEQ ID NO: 150415 - DNA, 20 bp, synthetic construct
  source 1..20: mol_type = other DNA; note = chemically synthesized
agctgaagacaggcgtgatg

SEQ ID NO: 150416-150443 - skipped (28 entries)

SEQ ID NO: 150444 - DNA, 20 bp, synthetic construct
  source 1..20: mol_type = other DNA; note = chemically synthesized
gtaccatagaaattttaaaa

SEQ ID NO: 150445-150480 - skipped (36 entries)

SEQ ID NO: 150481 - DNA, 20 bp, synthetic construct
  source 1..20: mol_type = other DNA; note = chemically synthesized
gcaaacaacgagacagcagg

SEQ ID NO: 150482-150485 - skipped (4 entries)

SEQ ID NO: 150486 - DNA, 20 bp, synthetic construct
  source 1..20: mol_type = other DNA; note = chemically synthesized
gcttgagtgacaactccatg

SEQ ID NO: 150487-150522 - skipped (36 entries)

SEQ ID NO: 150523 - DNA, 20 bp, synthetic construct
  source 1..20: mol_type = other DNA; note = chemically synthesized
cagatattcagcaaacacag

SEQ ID NO: 150524-150552 - skipped (29 entries)

SEQ ID NO: 150553 - DNA, 20 bp, synthetic construct
  source 1..20: mol_type = other DNA; note = chemically synthesized
tctgggagtctacttgatct

SEQ ID NO: 150554-150568 - skipped (15 entries)

SEQ ID NO: 150569 - DNA, 20 bp, synthetic construct
  source 1..20: mol_type = other DNA; note = chemically synthesized
ggtaaatgtggcacaggcaa

SEQ ID NO: 150570-150593 - skipped (24 entries)

SEQ ID NO: 150594 - DNA, 20 bp, synthetic construct
  source 1..20: mol_type = other DNA; note = chemically synthesized
gaaaaaagtaagagagtgag

SEQ ID NO: 150595 - DNA, 20 bp, synthetic construct
  source 1..20: mol_type = other DNA; note = chemically synthesized
aaaaaagtaagagagtgaga

SEQ ID NO: 150596-150597 - skipped (2 entries)

SEQ ID NO: 150598 - DNA, 20 bp, synthetic construct
  source 1..20: mol_type = other DNA; note = chemically synthesized
gagtgagagggttgcaagtt

SEQ ID NO: 150599-150606 - skipped (8 entries)

SEQ ID NO: 150607 - DNA, 20 bp, synthetic construct
  source 1..20: mol_type = other DNA; note = chemically synthesized
aaaccttcataatgagctaa

SEQ ID NO: 150608 - DNA, 20 bp, synthetic construct
  source 1..20: mol_type = other DNA; note = chemically synthesized
caaaccttcataatgagcta

SEQ ID NO: 150609-150610 - skipped (2 entries)

SEQ ID NO: 150611 - DNA, 20 bp, synthetic construct
  source 1..20: mol_type = other DNA; note = chemically synthesized
tagcccttagctcattatga

SEQ ID NO: 150612-150615 - skipped (4 entries)

SEQ ID NO: 150616 - DNA, 20 bp, synthetic construct
  source 1..20: mol_type = other DNA; note = chemically synthesized
gggagctaaggaaatttaga

SEQ ID NO: 150617-150626 - skipped (10 entries)

SEQ ID NO: 150627 - DNA, 20 bp, synthetic construct
  source 1..20: mol_type = other DNA; note = chemically synthesized
tccagagacaaagctagcta

SEQ ID NO: 150628-150637 - skipped (10 entries)

SEQ ID NO: 150638 - DNA, 20 bp, synthetic construct
  source 1..20: mol_type = other DNA; note = chemically synthesized
agaggaagtatgtaaagaaa

SEQ ID NO: 150639-150654 - skipped (16 entries)

SEQ ID NO: 150655 - DNA, 20 bp, synthetic construct
  source 1..20: mol_type = other DNA; note = chemically synthesized
ggaaacaaggagtaccaaag

SEQ ID NO: 150656 - DNA, 20 bp, synthetic construct
  source 1..20: mol_type = other DNA; note = chemically synthesized
tggaaacaaggagtaccaaa

SEQ ID NO: 150657 - DNA, 20 bp, synthetic construct
  source 1..20: mol_type = other DNA; note = chemically synthesized
ctggaaacaaggagtaccaa

SEQ ID NO: 150658-150668 - skipped (11 entries)

SEQ ID NO: 150669 - DNA, 20 bp, synthetic construct
  source 1..20: mol_type = other DNA; note = chemically synthesized
agactctgatccccagctca

SEQ ID NO: 150670 - DNA, 20 bp, synthetic construct
  source 1..20: mol_type = other DNA; note = chemically synthesized
gagaaggaacccttgagctg

SEQ ID NO: 150671 - DNA, 20 bp, synthetic construct
  source 1..20: mol_type = other DNA; note = chemically synthesized
gactctgatccccagctcaa

SEQ ID NO: 150672 - DNA, 20 bp, synthetic construct
  source 1..20: mol_type = other DNA; note = chemically synthesized
agagaaggaacccttgagct

SEQ ID NO: 150673 - DNA, 20 bp, synthetic construct
  source 1..20: mol_type = other DNA; note = chemically synthesized
cagagaaggaacccttgagc

SEQ ID NO: 150674-150690 - skipped (17 entries)

SEQ ID NO: 150691 - DNA, 20 bp, synthetic construct
  source 1..20: mol_type = other DNA; note = chemically synthesized
tacctgggaatgaatgagga

SEQ ID NO: 150692 - skipped

SEQ ID NO: 150693 - DNA, 20 bp, synthetic construct
  source 1..20: mol_type = other DNA; note = chemically synthesized
ccattacctgggaatgaatg

SEQ ID NO: 150694-150695 - skipped (2 entries)

SEQ ID NO: 150696 - DNA, 20 bp, synthetic construct
  source 1..20: mol_type = other DNA; note = chemically synthesized
tgccttcctcattcattccc

SEQ ID NO: 150697 - DNA, 20 bp, synthetic construct
  source 1..20: mol_type = other DNA; note = chemically synthesized
cctcattcattcccaggtaa

SEQ ID NO: 150698 - skipped

SEQ ID NO: 150699 - DNA, 20 bp, synthetic construct
  source 1..20: mol_type = other DNA; note = chemically synthesized
tcattgaatccccattacct

SEQ ID NO: 150700 - DNA, 20 bp, synthetic construct
  source 1..20: mol_type = other DNA; note = chemically synthesized
tcattcattcccaggtaatg

SEQ ID NO: 150701-150724 - skipped (24 entries)

SEQ ID NO: 150725 - DNA, 20 bp, synthetic construct
  source 1..20: mol_type = other DNA; note = chemically synthesized
attcaccattctgcatggct

SEQ ID NO: 150726-150855 - skipped (130 entries)

SEQ ID NO: 150856 - DNA, 20 bp, synthetic construct
  source 1..20: mol_type = other DNA; note = chemically synthesized
ctgtaccccccattgtatcc

SEQ ID NO: 150857-150926 - skipped (70 entries)

SEQ ID NO: 150927 - DNA, 20 bp, synthetic construct
  source 1..20: mol_type = other DNA; note = chemically synthesized
ccatgatagcagctgggagg

SEQ ID NO: 150928 - DNA, 20 bp, synthetic construct
  source 1..20: mol_type = other DNA; note = chemically synthesized
gccatgatagcagctgggag

SEQ ID NO: 150929 - skipped

SEQ ID NO: 150930 - DNA, 20 bp, synthetic construct
  source 1..20: mol_type = other DNA; note = chemically synthesized
tagccatgatagcagctggg

SEQ ID NO: 150931-150992 - skipped (62 entries)

SEQ ID NO: 150993 - DNA, 20 bp, synthetic construct
  source 1..20: mol_type = other DNA; note = chemically synthesized
tctgcactgtcccagcagag

SEQ ID NO: 150994 - skipped

SEQ ID NO: 150995 - DNA, 20 bp, synthetic construct
  source 1..20: mol_type = other DNA; note = chemically synthesized
ctcatggaaaacctctctgc

SEQ ID NO: 150996-151041 - skipped (46 entries)

SEQ ID NO: 151042 - DNA, 20 bp, synthetic construct
  source 1..20: mol_type = other DNA; note = chemically synthesized
aggccttagtggcttacatg

SEQ ID NO: 151043-151346 - skipped (304 entries)

SEQ ID NO: 151347 - DNA, 20 bp, synthetic construct
  source 1..20: mol_type = other DNA; note = chemically synthesized
ctttgaccaatgatatggtt

SEQ ID NO: 151348-151360 - skipped (13 entries)

SEQ ID NO: 151361 - DNA, 20 bp, synthetic construct
  source 1..20: mol_type = other DNA; note = chemically synthesized
tggggatctaatgtacatta

SEQ ID NO: 151362-151438 - skipped (77 entries)

SEQ ID NO: 151439 - DNA, 20 bp, synthetic construct
  source 1..20: mol_type = other DNA; note = chemically synthesized
cgctccttacctcccaaact

SEQ ID NO: 151440-151458 - skipped (19 entries)

SEQ ID NO: 151459 - DNA, 20 bp, synthetic construct
  source 1..20: mol_type = other DNA; note = chemically synthesized
ctgaaaagtgagtaggtatg

SEQ ID NO: 151460-151489 - skipped (30 entries)

SEQ ID NO: 151490 - DNA, 20 bp, synthetic construct
  source 1..20: mol_type = other DNA; note = chemically synthesized
agtaagtagttcacagtatc

SEQ ID NO: 151491 - skipped

SEQ ID NO: 151492 - DNA, 20 bp, synthetic construct
  source 1..20: mol_type = other DNA; note = chemically synthesized
agttcacagtatctggtata

SEQ ID NO: 151493-151519 - skipped (27 entries)

SEQ ID NO: 151520 - DNA, 20 bp, synthetic construct
  source 1..20: mol_type = other DNA; note = chemically synthesized
ttcacacagctaagatgcat

SEQ ID NO: 151521-151524 - skipped (4 entries)

SEQ ID NO: 151525 - DNA, 20 bp, synthetic construct
  source 1..20: mol_type = other DNA; note = chemically synthesized
taggagagaagaaatgaatg

SEQ ID NO: 151526-151538 - skipped (13 entries)

SEQ ID NO: 151539 - DNA, 20 bp, synthetic construct
  source 1..20: mol_type = other DNA; note = chemically synthesized
tgcatagtgttacaagtgaa

SEQ ID NO: 151540-151561 - skipped (22 entries)

SEQ ID NO: 151562 - DNA, 20 bp, synthetic construct
  source 1..20: mol_type = other DNA; note = chemically synthesized
taagactactgtaacagtcc

SEQ ID NO: 151563-151567 - skipped (5 entries)

SEQ ID NO: 151568 - DNA, 20 bp, synthetic construct
  source 1..20: mol_type = other DNA; note = chemically synthesized
aagagatgatgagattgtac

SEQ ID NO: 151569 - DNA, 20 bp, synthetic construct
  source 1..20: mol_type = other DNA; note = chemically synthesized
agagatgatgagattgtaca

SEQ ID NO: 151570 - DNA, 20 bp, synthetic construct
  source 1..20: mol_type = other DNA; note = chemically synthesized
gagatgatgagattgtacag

SEQ ID NO: 151571-151588 - skipped (18 entries)

SEQ ID NO: 151589 - DNA, 20 bp, synthetic construct
  source 1..20: mol_type = other DNA; note = chemically synthesized
ttagtggtggatgtccagca

SEQ ID NO: 151590-151592 - skipped (3 entries)

SEQ ID NO: 151593 - DNA, 20 bp, synthetic construct
  source 1..20: mol_type = other DNA; note = chemically synthesized
gtggatgtccagcaggggtg

SEQ ID NO: 151594-151596 - skipped (3 entries)

SEQ ID NO: 151597 - DNA, 20 bp, synthetic construct
  source 1..20: mol_type = other DNA; note = chemically synthesized
ccagcaggggtgaggtggga

SEQ ID NO: 151598-151601 - skipped (4 entries)

SEQ ID NO: 151602 - DNA, 20 bp, synthetic construct
  source 1..20: mol_type = other DNA; note = chemically synthesized
ctatccagtaacaaaatctt

SEQ ID NO: 151603 - skipped

SEQ ID NO: 151604 - DNA, 20 bp, synthetic construct
  source 1..20: mol_type = other DNA; note = chemically synthesized
gacccccaagattttgttac

SEQ ID NO: 151605-151607 - skipped (3 entries)

SEQ ID NO: 151608 - DNA, 20 bp, synthetic construct
  source 1..20: mol_type = other DNA; note = chemically synthesized
tttgttactggatagctaag

SEQ ID NO: 151609-151617 - skipped (9 entries)

SEQ ID NO: 151618 - DNA, 20 bp, synthetic construct
  source 1..20: mol_type = other DNA; note = chemically synthesized
ctgaagaaaggaatatatca

SEQ ID NO: 151619-151620 - skipped (2 entries)

SEQ ID NO: 151621 - DNA, 20 bp, synthetic construct
  source 1..20: mol_type = other DNA; note = chemically synthesized
gaaaggaatatatcagggga

SEQ ID NO: 151622-151638 - skipped (17 entries)

SEQ ID NO: 151639 - DNA, 20 bp, synthetic construct
  source 1..20: mol_type = other DNA; note = chemically synthesized
atatgcagtatggaatacag

SEQ ID NO: 151640-151651 - skipped (12 entries)

SEQ ID NO: 151652 - DNA, 20 bp, synthetic construct
  source 1..20: mol_type = other DNA; note = chemically synthesized
atttttcttattgttgtctt

SEQ ID NO: 151653-151658 - skipped (6 entries)

SEQ ID NO: 151659 - DNA, 20 bp, synthetic construct
  source 1..20: mol_type = other DNA; note = chemically synthesized
ctttgggtcccctgaaaaca

SEQ ID NO: 151660-151661 - skipped (2 entries)

SEQ ID NO: 151662 - DNA, 20 bp, synthetic construct
  source 1..20: mol_type = other DNA; note = chemically synthesized
ggtcccctgaaaacagggcc

SEQ ID NO: 151663-151664 - skipped (2 entries)

SEQ ID NO: 151665 - DNA, 20 bp, synthetic construct
  source 1..20: mol_type = other DNA; note = chemically synthesized
ctgtacccaagtcctcatcc

SEQ ID NO: 151666-151667 - skipped (2 entries)

SEQ ID NO: 151668 - DNA, 20 bp, synthetic construct
  source 1..20: mol_type = other DNA; note = chemically synthesized
cagggcctggatgaggactt

SEQ ID NO: 151669-151671 - skipped (3 entries)

SEQ ID NO: 151672 - DNA, 20 bp, synthetic construct
  source 1..20: mol_type = other DNA; note = chemically synthesized
ttgggtacagatagctcatt

SEQ ID NO: 151673-151675 - skipped (3 entries)

SEQ ID NO: 151676 - DNA, 20 bp, synthetic construct
  source 1..20: mol_type = other DNA; note = chemically synthesized
tcatttggaagctgatccct

SEQ ID NO: 151677-151701 - skipped (25 entries)

SEQ ID NO: 151702 - DNA, 20 bp, synthetic construct
  source 1..20: mol_type = other DNA; note = chemically synthesized
ggtaatgcttatggaccatg

SEQ ID NO: 151703 - DNA, 20 bp, synthetic construct
  source 1..20: mol_type = other DNA; note = chemically synthesized
ctgtcaaaatacagtcccca

SEQ ID NO: 151704-151707 - skipped (4 entries)

SEQ ID NO: 151708 - DNA, 20 bp, synthetic construct
  source 1..20: mol_type = other DNA; note = chemically synthesized
gggaattctctgtgattctc

SEQ ID NO: 151709-151712 - skipped (4 entries)

SEQ ID NO: 151713 - DNA, 20 bp, synthetic construct
  source 1..20: mol_type = other DNA; note = chemically synthesized
cagagaattccccttgcccc

SEQ ID NO: 151714 - skipped

SEQ ID NO: 151715 - DNA, 20 bp, synthetic construct
  source 1..20: mol_type = other DNA; note = chemically synthesized
cactattccttccgggggca

SEQ ID NO: 151716-151717 - skipped (2 entries)

SEQ ID NO: 151718 - DNA, 20 bp, synthetic construct
  source 1..20: mol_type = other DNA; note = chemically synthesized
gaattccccttgcccccgga

SEQ ID NO: 151719-151722 - skipped (4 entries)

SEQ ID NO: 151723 - DNA, 20 bp, synthetic construct
  source 1..20: mol_type = other DNA; note = chemically synthesized
tttttaaccactattccttc

SEQ ID NO: 151724 - skipped

SEQ ID NO: 151725 - DNA, 20 bp, synthetic construct
  source 1..20: mol_type = other DNA; note = chemically synthesized
agtggttaaaaatatatcca

SEQ ID NO: 151726 - DNA, 20 bp, synthetic construct
  source 1..20: mol_type = other DNA; note = chemically synthesized
gtggttaaaaatatatccat

SEQ ID NO: 151727 - DNA, 20 bp, synthetic construct
  source 1..20: mol_type = other DNA; note = chemically synthesized
ccaatggagatgggagccca

SEQ ID NO: 151728-151729 - skipped (2 entries)

SEQ ID NO: 151730 - DNA, 20 bp, synthetic construct
  source 1..20: mol_type = other DNA; note = chemically synthesized
ccatgggctcccatctccat

SEQ ID NO: 151731-151739 - skipped (9 entries)

SEQ ID NO: 151740 - DNA, 20 bp, synthetic construct
  source 1..20: mol_type = other DNA; note = chemically synthesized
gctcactcactaaaacttca

SEQ ID NO: 151741-151745 - skipped (5 entries)

SEQ ID NO: 151746 - DNA, 20 bp, synthetic construct
  source 1..20: mol_type = other DNA; note = chemically synthesized
gagaaagctcacaaaatctg

SEQ ID NO: 151747-151763 - skipped (17 entries)

SEQ ID NO: 151764 - DNA, 20 bp, synthetic construct
  source 1..20: mol_type = other DNA; note = chemically synthesized
ttagatagaaagtagaaaaa

SEQ ID NO: 151765-151766 - skipped (2 entries)

SEQ ID NO: 151767 - DNA, 20 bp, synthetic construct
  source 1..20: mol_type = other DNA; note = chemically synthesized
agcatcccatgtcaagggaa

SEQ ID NO: 151768 - DNA, 20 bp, synthetic construct
  source 1..20: mol_type = other DNA; note = chemically synthesized
tgggagccattcccttgaca

SEQ ID NO: 151769 - DNA, 20 bp, synthetic construct
  source 1..20: mol_type = other DNA; note = chemically synthesized
gggagccattcccttgacat

SEQ ID NO: 151770 - DNA, 20 bp, synthetic construct
  source 1..20: mol_type = other DNA; note = chemically synthesized
ctgacagcatcccatgtcaa

SEQ ID NO: 151771 - DNA, 20 bp, synthetic construct
  source 1..20: mol_type = other DNA; note = chemically synthesized
gctgacagcatcccatgtca

SEQ ID NO: 151772-151775 - skipped (4 entries)

SEQ ID NO: 151776 - DNA, 20 bp, synthetic construct
  source 1..20: mol_type = other DNA; note = chemically synthesized
catgggatgctgtcagctaa

SEQ ID NO: 151777-151780 - skipped (4 entries)

SEQ ID NO: 151781 - DNA, 20 bp, synthetic construct
  source 1..20: mol_type = other DNA; note = chemically synthesized
aggcaagtctgaactcacac

SEQ ID NO: 151782 - DNA, 20 bp, synthetic construct
  source 1..20: mol_type = other DNA; note = chemically synthesized
ggcaagtctgaactcacaca

SEQ ID NO: 151783-151785 - skipped (3 entries)

SEQ ID NO: 151786 - DNA, 20 bp, synthetic construct
  source 1..20: mol_type = other DNA; note = chemically synthesized
cactgcagttgcagctgcag

SEQ ID NO: 151787-151790 - skipped (4 entries)

SEQ ID NO: 151791 - DNA, 20 bp, synthetic construct
  source 1..20: mol_type = other DNA; note = chemically synthesized
tgcagctgcaactgcagtgc

SEQ ID NO: 151792 - skipped

SEQ ID NO: 151793 - DNA, 20 bp, synthetic construct
  source 1..20: mol_type = other DNA; note = chemically synthesized
gcaactgcagtgcaggaaaa

SEQ ID NO: 151794-151798 - skipped (5 entries)

SEQ ID NO: 151799 - DNA, 20 bp, synthetic construct
  source 1..20: mol_type = other DNA; note = chemically synthesized
gcgtgtgactccaggcacca

SEQ ID NO: 151800-151801 - skipped (2 entries)

SEQ ID NO: 151802 - DNA, 20 bp, synthetic construct
  source 1..20: mol_type = other DNA; note = chemically synthesized
acaattgtaacagattcccc

SEQ ID NO: 151803-151835 - skipped (33 entries)

SEQ ID NO: 151836 - DNA, 20 bp, synthetic construct
  source 1..20: mol_type = other DNA; note = chemically synthesized
gatggaggcgattgtgctgt

SEQ ID NO: 151837 - DNA, 20 bp, synthetic construct
  source 1..20: mol_type = other DNA; note = chemically synthesized
agatggaggcgattgtgctg

SEQ ID NO: 151838-152011 - skipped (174 entries)

SEQ ID NO: 152012 - DNA, 20 bp, synthetic construct
  source 1..20: mol_type = other DNA; note = chemically synthesized
cttctccagcctagatgttt

SEQ ID NO: 152013-152059 - skipped (47 entries)

SEQ ID NO: 152060 - DNA, 20 bp, synthetic construct
  source 1..20: mol_type = other DNA; note = chemically synthesized
tggtagaaattactaaacta

SEQ ID NO: 152061-152067 - skipped (7 entries)

SEQ ID NO: 152068 - DNA, 20 bp, synthetic construct
  source 1..20: mol_type = other DNA; note = chemically synthesized
ggtttatcaagccaaatgcc

SEQ ID NO: 152069 - DNA, 20 bp, synthetic construct
  source 1..20: mol_type = other DNA; note = chemically synthesized
gtttatcaagccaaatgcct

SEQ ID NO: 152070 - DNA, 20 bp, synthetic construct
  source 1..20: mol_type = other DNA; note = chemically synthesized
gaatagaacacccaggcatt

SEQ ID NO: 152071 - DNA, 20 bp, synthetic construct
  source 1..20: mol_type = other DNA; note = chemically synthesized
agaacgcgaatagaacaccc

SEQ ID NO: 152072-152079 - skipped (8 entries)

SEQ ID NO: 152080 - DNA, 20 bp, synthetic construct
  source 1..20: mol_type = other DNA; note = chemically synthesized
aacaggccctggtaactgat

SEQ ID NO: 152081 - skipped

SEQ ID NO: 152082 - DNA, 20 bp, synthetic construct
  source 1..20: mol_type = other DNA; note = chemically synthesized
tttatgtccaatcagttacc

SEQ ID NO: 152083 - DNA, 20 bp, synthetic construct
  source 1..20: mol_type = other DNA; note = chemically synthesized
ttatgtccaatcagttacca

SEQ ID NO: 152084-152094 - skipped (11 entries)

SEQ ID NO: 152095 - DNA, 20 bp, synthetic construct
  source 1..20: mol_type = other DNA; note = chemically synthesized
taaagaagtaataaagggaa

SEQ ID NO: 152096-152105 - skipped (10 entries)

SEQ ID NO: 152106 - DNA, 20 bp, synthetic construct
  source 1..20: mol_type = other DNA; note = chemically synthesized
ggaggctattccagtggttc

SEQ ID NO: 152107-152113 - skipped (7 entries)

SEQ ID NO: 152114 - DNA, 20 bp, synthetic construct
  source 1..20: mol_type = other DNA; note = chemically synthesized
tgattggataagagcaactt

SEQ ID NO: 152115-152117 - skipped (3 entries)

SEQ ID NO: 152118 - DNA, 20 bp, synthetic construct
  source 1..20: mol_type = other DNA; note = chemically synthesized
ctgaagaataggtaactgat

SEQ ID NO: 152119 - skipped

SEQ ID NO: 152120 - DNA, 20 bp, synthetic construct
  source 1..20: mol_type = other DNA; note = chemically synthesized
gattactctggctgaagaat

SEQ ID NO: 152121-152124 - skipped (4 entries)

SEQ ID NO: 152125 - DNA, 20 bp, synthetic construct
  source 1..20: mol_type = other DNA; note = chemically synthesized
gggttttagagggattactc

SEQ ID NO: 152126-152130 - skipped (5 entries)

SEQ ID NO: 152131 - DNA, 20 bp, synthetic construct
  source 1..20: mol_type = other DNA; note = chemically synthesized
actagtgacatgagcatatt

SEQ ID NO: 152132-152149 - skipped (18 entries)

SEQ ID NO: 152150 - DNA, 20 bp, synthetic construct
  source 1..20: mol_type = other DNA; note = chemically synthesized
gaggacattccagatgatgc

SEQ ID NO: 152151-152165 - skipped (15 entries)

SEQ ID NO: 152166 - DNA, 20 bp, synthetic construct
  source 1..20: mol_type = other DNA; note = chemically synthesized
atggctgaagcactgagttg

SEQ ID NO: 152167 - DNA, 20 bp, synthetic construct
  source 1..20: mol_type = other DNA; note = chemically synthesized
tatggctgaagcactgagtt

SEQ ID NO: 152168 - DNA, 20 bp, synthetic construct
  source 1..20: mol_type = other DNA; note = chemically synthesized
gtatggctgaagcactgagt

SEQ ID NO: 152169-152180 - skipped (12 entries)

SEQ ID NO: 152181 - DNA, 20 bp, synthetic construct
  source 1..20: mol_type = other DNA; note = chemically synthesized
caagagaaacaagtaacagt

SEQ ID NO: 152182-152183 - skipped (2 entries)

SEQ ID NO: 152184 - DNA, 20 bp, synthetic construct
  source 1..20: mol_type = other DNA; note = chemically synthesized
tgttacttgtttctcttgcc

SEQ ID NO: 152185-152191 - skipped (7 entries)

SEQ ID NO: 152192 - DNA, 20 bp, synthetic construct
  source 1..20: mol_type = other DNA; note = chemically synthesized
tgtacctaggcaaacaagta

SEQ ID NO: 152193 - DNA, 20 bp, synthetic construct
  source 1..20: mol_type = other DNA; note = chemically synthesized
gtgtacctaggcaaacaagt

SEQ ID NO: 152194-152196 - skipped (3 entries)

SEQ ID NO: 152197 - DNA, 20 bp, synthetic construct
  source 1..20: mol_type = other DNA; note = chemically synthesized
tctcccctacttgtttgcct

SEQ ID NO: 152198-152255 - skipped (58 entries)

SEQ ID NO: 152256 - DNA, 20 bp, synthetic construct
  source 1..20: mol_type = other DNA; note = chemically synthesized
atccctagaatctaacacac

SEQ ID NO: 152257-152279 - skipped (23 entries)

SEQ ID NO: 152280 - DNA, 20 bp, synthetic construct
  source 1..20: mol_type = other DNA; note = chemically synthesized
agttaagtcaaatagtgtac

SEQ ID NO: 152281 - DNA, 20 bp, synthetic construct
  source 1..20: mol_type = other DNA; note = chemically synthesized
tcaaatagtgtactggaaaa

SEQ ID NO: 152282-152284 - skipped (3 entries)

SEQ ID NO: 152285 - DNA, 20 bp, synthetic construct
  source 1..20: mol_type = other DNA; note = chemically synthesized
atggcttcttatccccctga

SEQ ID NO: 152286 - DNA, 20 bp, synthetic construct
  source 1..20: mol_type = other DNA; note = chemically synthesized
caggagatgtcaccatcagg

SEQ ID NO: 152287 - DNA, 20 bp, synthetic construct
  source 1..20: mol_type = other DNA; note = chemically synthesized
gcaggagatgtcaccatcag

SEQ ID NO: 152288-152346 - skipped (59 entries)

SEQ ID NO: 152347 - DNA, 20 bp, synthetic construct
  source 1..20: mol_type = other DNA; note = chemically synthesized
tacttcaatatctaaatata

SEQ ID NO: 152348-152386 - skipped (39 entries)

SEQ ID NO: 152387 - DNA, 20 bp, synthetic construct
  source 1..20: mol_type = other DNA; note = chemically synthesized
acactcttaagagttgtacc

SEQ ID NO: 152388-152395 - skipped (8 entries)

SEQ ID NO: 152396 - DNA, 20 bp, synthetic construct
  source 1..20: mol_type = other DNA; note = chemically synthesized
accacttacttagcatagaa

SEQ ID NO: 152397-152413 - skipped (17 entries)

SEQ ID NO: 152414 - DNA, 20 bp, synthetic construct
  source 1..20: mol_type = other DNA; note = chemically synthesized
tcttcttaaggcttcctcca

SEQ ID NO: 152415-152421 - skipped (7 entries)

SEQ ID NO: 152422 - DNA, 20 bp, synthetic construct
  source 1..20: mol_type = other DNA; note = chemically synthesized
gaggaagccttaagaagatt

SEQ ID NO: 152423-152459 - skipped (37 entries)

SEQ ID NO: 152460 - DNA, 20 bp, synthetic construct
  source 1..20: mol_type = other DNA; note = chemically synthesized
atgaggtgcaaagcagccat

SEQ ID NO: 152461-152491 - skipped (31 entries)

SEQ ID NO: 152492 - DNA, 20 bp, synthetic construct
  source 1..20: mol_type = other DNA; note = chemically synthesized
actgtttcagcgggaggtat

SEQ ID NO: 152493-152520 - skipped (28 entries)

SEQ ID NO: 152521 - DNA, 20 bp, synthetic construct
  source 1..20: mol_type = other DNA; note = chemically synthesized
tactgtagttagaagaaaaa

SEQ ID NO: 152522-152564 - skipped (43 entries)

SEQ ID NO: 152565 - DNA, 20 bp, synthetic construct
  source 1..20: mol_type = other DNA; note = chemically synthesized
acactcaaggaataaattgg

SEQ ID NO: 152566-152571 - skipped (6 entries)

SEQ ID NO: 152572 - DNA, 20 bp, synthetic construct
  source 1..20: mol_type = other DNA; note = chemically synthesized
tgagtgtgcatcccttggta

SEQ ID NO: 152573 - DNA, 20 bp, synthetic construct
  source 1..20: mol_type = other DNA; note = chemically synthesized
tcagcaataagccataccaa

SEQ ID NO: 152574-152582 - skipped (9 entries)

SEQ ID NO: 152583 - DNA, 20 bp, synthetic construct
  source 1..20: mol_type = other DNA; note = chemically synthesized
atgagtggatagacctgcgt

SEQ ID NO: 152584-152589 - skipped (6 entries)

SEQ ID NO: 152590 - DNA, 20 bp, synthetic construct
  source 1..20: mol_type = other DNA; note = chemically synthesized
tctcaatccacttgcatcca

SEQ ID NO: 152591-152592 - skipped (2 entries)

SEQ ID NO: 152593 - DNA, 20 bp, synthetic construct
  source 1..20: mol_type = other DNA; note = chemically synthesized
agtaaaacccagtgtgagca

SEQ ID NO: 152594 - skipped

SEQ ID NO: 152595 - DNA, 20 bp, synthetic construct
  source 1..20: mol_type = other DNA; note = chemically synthesized
atccatggccttgctcacac

SEQ ID NO: 152596 - DNA, 20 bp, synthetic construct
  source 1..20: mol_type = other DNA; note = chemically synthesized
tccatggccttgctcacact

SEQ ID NO: 152597-152610 - skipped (14 entries)

SEQ ID NO: 152611 - DNA, 20 bp, synthetic construct
  source 1..20: mol_type = other DNA; note = chemically synthesized
agccaagaagcatgcttaag

SEQ ID NO: 152612-152619 - skipped (8 entries)

SEQ ID NO: 152620 - DNA, 20 bp, synthetic construct
  source 1..20: mol_type = other DNA; note = chemically synthesized
tgggacactggctagaggaa

SEQ ID NO: 152621-152664 - skipped (44 entries)

SEQ ID NO: 152665 - DNA, 20 bp, synthetic construct
  source 1..20: mol_type = other DNA; note = chemically synthesized
gactggttgaaattgcagat

SEQ ID NO: 152666-152676 - skipped (11 entries)

SEQ ID NO: 152677 - DNA, 20 bp, synthetic construct
  source 1..20: mol_type = other DNA; note = chemically synthesized
aggaaactctacccttttga

SEQ ID NO: 152678 - DNA, 20 bp, synthetic construct
  source 1..20: mol_type = other DNA; note = chemically synthesized
gtccccttcggccgtcaaaa

SEQ ID NO: 152679-152682 - skipped (4 entries)

SEQ ID NO: 152683 - DNA, 20 bp, synthetic construct
  source 1..20: mol_type = other DNA; note = chemically synthesized
ctacccttttgacggccgaa

SEQ ID NO: 152684 - DNA, 20 bp, synthetic construct
  source 1..20: mol_type = other DNA; note = chemically synthesized
tacccttttgacggccgaag

SEQ ID NO: 152685-152730 - skipped (46 entries)

SEQ ID NO: 152731 - DNA, 20 bp, synthetic construct
  source 1..20: mol_type = other DNA; note = chemically synthesized
cagcacttcatttaatctta

SEQ ID NO: 152732-152745 - skipped (14 entries)

SEQ ID NO: 152746 - DNA, 20 bp, synthetic construct
  source 1..20: mol_type = other DNA; note = chemically synthesized
agtagatctggaaaatctat

SEQ ID NO: 152747-152762 - skipped (16 entries)

SEQ ID NO: 152763 - DNA, 20 bp, synthetic construct
  source 1..20: mol_type = other DNA; note = chemically synthesized
gaattgacagttacagatgt

SEQ ID NO: 152764-152826 - skipped (63 entries)

SEQ ID NO: 152827 - DNA, 20 bp, synthetic construct
  source 1..20: mol_type = other DNA; note = chemically synthesized
catgcaaaacggaaaagaaa

SEQ ID NO: 152828-152840 - skipped (13 entries)

SEQ ID NO: 152841 - DNA, 20 bp, synthetic construct
  source 1..20: mol_type = other DNA; note = chemically synthesized
agaattggtcctagagtata

SEQ ID NO: 152842-152866 - skipped (25 entries)

SEQ ID NO: 152867 - DNA, 20 bp, synthetic construct
  source 1..20: mol_type = other DNA; note = chemically synthesized
aaaaacacccagctactaag

SEQ ID NO: 152868-152871 - skipped (4 entries)

SEQ ID NO: 152872 - DNA, 20 bp, synthetic construct
  source 1..20: mol_type = other DNA; note = chemically synthesized
acttagtagctgggtgtttt

SEQ ID NO: 152873-152895 - skipped (23 entries)

SEQ ID NO: 152896 - DNA, 20 bp, synthetic construct
  source 1..20: mol_type = other DNA; note = chemically synthesized
agaatacttggcaaaatgcc

SEQ ID NO: 152897-152905 - skipped (9 entries)

SEQ ID NO: 152906 - DNA, 20 bp, synthetic construct
  source 1..20: mol_type = other DNA; note = chemically synthesized
acatacctaatatttatctt

SEQ ID NO: 152907-152942 - skipped (36 entries)

SEQ ID NO: 152943 - DNA, 20 bp, synthetic construct
  source 1..20: mol_type = other DNA; note = chemically synthesized
ttcatgtttaactctcctgg

SEQ ID NO: 152944 - skipped

SEQ ID NO: 152945 - DNA, 20 bp, synthetic construct
  source 1..20: mol_type = other DNA; note = chemically synthesized
cacttcatgtttaactctcc

SEQ ID NO: 152946-152961 - skipped (16 entries)

SEQ ID NO: 152962 - DNA, 20 bp, synthetic construct
  source 1..20: mol_type = other DNA; note = chemically synthesized
ccatgcattcaaatgttcct

SEQ ID NO: 152963-152970 - skipped (8 entries)

SEQ ID NO: 152971 - DNA, 20 bp, synthetic construct
  source 1..20: mol_type = other DNA; note = chemically synthesized
cgcaaatctctatgattctg

SEQ ID NO: 152972 - skipped

SEQ ID NO: 152973 - DNA, 20 bp, synthetic construct
  source 1..20: mol_type = other DNA; note = chemically synthesized
acgcaaatctctatgattct

SEQ ID NO: 152974 - DNA, 20 bp, synthetic construct
  source 1..20: mol_type = other DNA; note = chemically synthesized
gacgcaaatctctatgattc

SEQ ID NO: 152975-152985 - skipped (11 entries)

SEQ ID NO: 152986 - DNA, 20 bp, synthetic construct
  source 1..20: mol_type = other DNA; note = chemically synthesized
cacattcaaagaggttggaa

SEQ ID NO: 152987-153007 - skipped (21 entries)

SEQ ID NO: 153008 - DNA, 20 bp, synthetic construct
  source 1..20: mol_type = other DNA; note = chemically synthesized
catacagcttgaggaatctc

SEQ ID NO: 153009-153022 - skipped (14 entries)

SEQ ID NO: 153023 - DNA, 20 bp, synthetic construct
  source 1..20: mol_type = other DNA; note = chemically synthesized
agtttttcttgtctttcagc

SEQ ID NO: 153024-153054 - skipped (31 entries)

SEQ ID NO: 153055 - DNA, 20 bp, synthetic construct
  source 1..20: mol_type = other DNA; note = chemically synthesized
tgtgcaggttcaaaggaaaa

SEQ ID NO: 153056-153075 - skipped (20 entries)

SEQ ID NO: 153076 - DNA, 20 bp, synthetic construct
  source 1..20: mol_type = other DNA; note = chemically synthesized
cttgtcatactgaagtgaat

SEQ ID NO: 153077-153097 - skipped (21 entries)

SEQ ID NO: 153098 - DNA, 20 bp, synthetic construct
  source 1..20: mol_type = other DNA; note = chemically synthesized
aatgaagggacattggagat

SEQ ID NO: 153099-153172 - skipped (74 entries)

SEQ ID NO: 153173 - DNA, 20 bp, synthetic construct
  source 1..20: mol_type = other DNA; note = chemically synthesized
gcatgggctggcaagcactt

SEQ ID NO: 153174-153181 - skipped (8 entries)

SEQ ID NO: 153182 - DNA, 20 bp, synthetic construct
  source 1..20: mol_type = other DNA; note = chemically synthesized
aaaatactgaagatgagaga

SEQ ID NO: 153183-153200 - skipped (18 entries)

SEQ ID NO: 153201 - DNA, 20 bp, synthetic construct
  source 1..20: mol_type = other DNA; note = chemically synthesized
caagacacagtcaagaatga

SEQ ID NO: 153202-153205 - skipped (4 entries)

SEQ ID NO: 153206 - DNA, 20 bp, synthetic construct
  source 1..20: mol_type = other DNA; note = chemically synthesized
gaatgagggtttaaggagat

SEQ ID NO: 153207-153250 - skipped (44 entries)

SEQ ID NO: 153251 - DNA, 20 bp, synthetic construct
  source 1..20: mol_type = other DNA; note = chemically synthesized
gaaattaaactcaggagatg

SEQ ID NO: 153252 - skipped

SEQ ID NO: 153253 - DNA, 20 bp, synthetic construct
  source 1..20: mol_type = other DNA; note = chemically synthesized
aattaaactcaggagatgtg

SEQ ID NO: 153254-153284 - skipped (31 entries)

SEQ ID NO: 153285 - DNA, 20 bp, synthetic construct
  source 1..20: mol_type = other DNA; note = chemically synthesized
gaattaaagctagacacacc

SEQ ID NO: 153286-153297 - skipped (12 entries)

SEQ ID NO: 153298 - DNA, 20 bp, synthetic construct
  source 1..20: mol_type = other DNA; note = chemically synthesized
tttatgatgtgacagagtca

SEQ ID NO: 153299-153332 - skipped (34 entries)

SEQ ID NO: 153333 - DNA, 20 bp, synthetic construct
  source 1..20: mol_type = other DNA; note = chemically synthesized
ctgttttgttgccagaccat

SEQ ID NO: 153334 - skipped

SEQ ID NO: 153335 - DNA, 20 bp, synthetic construct
  source 1..20: mol_type = other DNA; note = chemically synthesized
tcagatgagtccccatggtc

SEQ ID NO: 153336-153426 - skipped (91 entries)

SEQ ID NO: 153427 - DNA, 20 bp, synthetic construct
  source 1..20: mol_type = other DNA; note = chemically synthesized
accctaccgctcaaaatgga

SEQ ID NO: 153428-153433 - skipped (6 entries)

SEQ ID NO: 153434 - DNA, 20 bp, synthetic construct
  source 1..20: mol_type = other DNA; note = chemically synthesized
gccttccattttgagcggta

SEQ ID NO: 153435-153495 - skipped (61 entries)

SEQ ID NO: 153496 - DNA, 20 bp, synthetic construct
  source 1..20: mol_type = other DNA; note = chemically synthesized
ccccaaagcacaaccctaac

SEQ ID NO: 153497-153509 - skipped (13 entries)

SEQ ID NO: 153510 - DNA, 20 bp, synthetic construct
  source 1..20: mol_type = other DNA; note = chemically synthesized
aactaccaaaaggttaagag

SEQ ID NO: 153511-153517 - skipped (7 entries)

SEQ ID NO: 153518 - DNA, 20 bp, synthetic construct
  source 1..20: mol_type = other DNA; note = chemically synthesized
aagggaacttcatcacaaaa

SEQ ID NO: 153519-153530 - skipped (12 entries)

SEQ ID NO: 153531 - DNA, 20 bp, synthetic construct
  source 1..20: mol_type = other DNA; note = chemically synthesized
taacaggaaaggcactacag

SEQ ID NO: 153532 - skipped

SEQ ID NO: 153533 - DNA, 20 bp, synthetic construct
  source 1..20: mol_type = other DNA; note = chemically synthesized
tgctcactggttaacaggaa

SEQ ID NO: 153534-153538 - skipped (5 entries)

SEQ ID NO: 153539 - DNA, 20 bp, synthetic construct
  source 1..20: mol_type = other DNA; note = chemically synthesized
ggtccttcaacaatgctcac

SEQ ID NO: 153540 - skipped

SEQ ID NO: 153541 - DNA, 20 bp, synthetic construct
  source 1..20: mol_type = other DNA; note = chemically synthesized
taaccagtgagcattgttga

SEQ ID NO: 153542-153547 - skipped (6 entries)

SEQ ID NO: 153548 - DNA, 20 bp, synthetic construct
  source 1..20: mol_type = other DNA; note = chemically synthesized
gaaggacctggcctgggacc

SEQ ID NO: 153549 - DNA, 20 bp, synthetic construct
  source 1..20: mol_type = other DNA; note = chemically synthesized
aaggacctggcctgggacca

SEQ ID NO: 153550 - DNA, 20 bp, synthetic construct
  source 1..20: mol_type = other DNA; note = chemically synthesized
agtagggggtccctggtccc

SEQ ID NO: 153551 - skipped

SEQ ID NO: 153552 - DNA, 20 bp, synthetic construct
  source 1..20: mol_type = other DNA; note = chemically synthesized
tgaaggcagtagggggtccc

SEQ ID NO: 153553 - DNA, 20 bp, synthetic construct
  source 1..20: mol_type = other DNA; note = chemically synthesized
ctttccatgaaggcagtagg

SEQ ID NO: 153554-153564 - skipped (11 entries)

SEQ ID NO: 153565 - DNA, 20 bp, synthetic construct
  source 1..20: mol_type = other DNA; note = chemically synthesized
cacttctcacactcatcaga

SEQ ID NO: 153566-153571 - skipped (6 entries)

SEQ ID NO: 153572 - DNA, 20 bp, synthetic construct
  source 1..20: mol_type = other DNA; note = chemically synthesized
gatgagtgtgagaagtgctg

SEQ ID NO: 153573-153575 - skipped (3 entries)

SEQ ID NO: 153576 - DNA, 20 bp, synthetic construct
  source 1..20: mol_type = other DNA; note = chemically synthesized
acagaaagccctggctggtg

SEQ ID NO: 153577 - DNA, 20 bp, synthetic construct
  source 1..20: mol_type = other DNA; note = chemically synthesized
gtgctggggcctcaccagcc

SEQ ID NO: 153578 - skipped

SEQ ID NO: 153579 - DNA, 20 bp, synthetic construct
  source 1..20: mol_type = other DNA; note = chemically synthesized
tgctggggcctcaccagcca

SEQ ID NO: 153580 - DNA, 20 bp, synthetic construct
  source 1..20: mol_type = other DNA; note = chemically synthesized
tgacaacagaaagccctggc

SEQ ID NO: 153581 - DNA, 20 bp, synthetic construct
  source 1..20: mol_type = other DNA; note = chemically synthesized
ggagtgacaacagaaagccc

SEQ ID NO: 153582-153587 - skipped (6 entries)

SEQ ID NO: 153588 - DNA, 20 bp, synthetic construct
  source 1..20: mol_type = other DNA; note = chemically synthesized
agatgtgtcacactgtagaa

SEQ ID NO: 153589-153607 - skipped (19 entries)

SEQ ID NO: 153608 - DNA, 20 bp, synthetic construct
  source 1..20: mol_type = other DNA; note = chemically synthesized
gagtctctccagctgctcca

SEQ ID NO: 153609-153614 - skipped (6 entries)

SEQ ID NO: 153615 - DNA, 20 bp, synthetic construct
  source 1..20: mol_type = other DNA; note = chemically synthesized
tccaaggccttgcagtatct

SEQ ID NO: 153616-153631 - skipped (16 entries)

SEQ ID NO: 153632 - DNA, 20 bp, synthetic construct
  source 1..20: mol_type = other DNA; note = chemically synthesized
tcctcaaagtctaatacgtc

SEQ ID NO: 153633-153681 - skipped (49 entries)

SEQ ID NO: 153682 - DNA, 20 bp, synthetic construct
  source 1..20: mol_type = other DNA; note = chemically synthesized
accacaacaggaaagggtgt

SEQ ID NO: 153683 - DNA, 20 bp, synthetic construct
  source 1..20: mol_type = other DNA; note = chemically synthesized
atagaaacatggcaggggag

SEQ ID NO: 153684-153740 - skipped (57 entries)

SEQ ID NO: 153741 - DNA, 20 bp, synthetic construct
  source 1..20: mol_type = other DNA; note = chemically synthesized
tatttaaagtattattgaaa

SEQ ID NO: 153742-153854 - skipped (113 entries)

SEQ ID NO: 153855 - DNA, 20 bp, synthetic construct
  source 1..20: mol_type = other DNA; note = chemically synthesized
gagctagtcagtgacagagt

SEQ ID NO: 153856 - DNA, 20 bp, synthetic construct
  source 1..20: mol_type = other DNA; note = chemically synthesized
agagctagtcagtgacagag

SEQ ID NO: 153857-153881 - skipped (25 entries)

SEQ ID NO: 153882 - DNA, 20 bp, synthetic construct
  source 1..20: mol_type = other DNA; note = chemically synthesized
ttactcaaaaggtataactg

SEQ ID NO: 153883-153900 - skipped (18 entries)

SEQ ID NO: 153901 - DNA, 20 bp, synthetic construct
  source 1..20: mol_type = other DNA; note = chemically synthesized
taaatacaaataattcaatt

SEQ ID NO: 153902-153907 - skipped (6 entries)

SEQ ID NO: 153908 - DNA, 20 bp, synthetic construct
  source 1..20: mol_type = other DNA; note = chemically synthesized
gagctgatcccagaaagcca

SEQ ID NO: 153909-153925 - skipped (17 entries)

SEQ ID NO: 153926 - DNA, 20 bp, synthetic construct
  source 1..20: mol_type = other DNA; note = chemically synthesized
ctgtcagttgtatctcagca

SEQ ID NO: 153927-153932 - skipped (6 entries)

SEQ ID NO: 153933 - DNA, 20 bp, synthetic construct
  source 1..20: mol_type = other DNA; note = chemically synthesized
gatatatgagaatactgaag

SEQ ID NO: 153934-153945 - skipped (12 entries)

SEQ ID NO: 153946 - DNA, 20 bp, synthetic construct
  source 1..20: mol_type = other DNA; note = chemically synthesized
cttcccattttggcagaatc

SEQ ID NO: 153947-153952 - skipped (6 entries)

SEQ ID NO: 153953 - DNA, 20 bp, synthetic construct
  source 1..20: mol_type = other DNA; note = chemically synthesized
tgggaagaaagcctacacat

SEQ ID NO: 153954 - DNA, 20 bp, synthetic construct
  source 1..20: mol_type = other DNA; note = chemically synthesized
taggcttccttccgatgtgt

SEQ ID NO: 153955-153959 - skipped (5 entries)

SEQ ID NO: 153960 - DNA, 20 bp, synthetic construct
  source 1..20: mol_type = other DNA; note = chemically synthesized
atcggaaggaagcctatacg

SEQ ID NO: 153961 - DNA, 20 bp, synthetic construct
  source 1..20: mol_type = other DNA; note = chemically synthesized
cttattagcatgcctcgtat

SEQ ID NO: 153962-153976 - skipped (15 entries)

SEQ ID NO: 153977 - DNA, 20 bp, synthetic construct
  source 1..20: mol_type = other DNA; note = chemically synthesized
tagtgtggaacatgcattgg

SEQ ID NO: 153978-153979 - skipped (2 entries)

SEQ ID NO: 153980 - DNA, 20 bp, synthetic construct
  source 1..20: mol_type = other DNA; note = chemically synthesized
attggaggtgtcctacccaa

SEQ ID NO: 153981 - skipped

SEQ ID NO: 153982 - DNA, 20 bp, synthetic construct
  source 1..20: mol_type = other DNA; note = chemically synthesized
accttcttctccccttgggt

SEQ ID NO: 153983-153984 - skipped (2 entries)

SEQ ID NO: 153985 - DNA, 20 bp, synthetic construct
  source 1..20: mol_type = other DNA; note = chemically synthesized
tcccaccttcttctcccctt

SEQ ID NO: 153986-153989 - skipped (4 entries)

SEQ ID NO: 153990 - DNA, 20 bp, synthetic construct
  source 1..20: mol_type = other DNA; note = chemically synthesized
tacccaaggggagaagaagg

SEQ ID NO: 153991 - DNA, 20 bp, synthetic construct
  source 1..20: mol_type = other DNA; note = chemically synthesized
acccaaggggagaagaaggt

SEQ ID NO: 153992-154085 - skipped (94 entries)

SEQ ID NO: 154086 - DNA, 20 bp, synthetic construct
  source 1..20: mol_type = other DNA; note = chemically synthesized
aagctgggggataaaggtgt

SEQ ID NO: 154087-154089 - skipped (3 entries)

SEQ ID NO: 154090 - DNA, 20 bp, synthetic construct
  source 1..20: mol_type = other DNA; note = chemically synthesized
aaccaatggacaaaagctgg

SEQ ID NO: 154091 - skipped

SEQ ID NO: 154092 - DNA, 20 bp, synthetic construct
  source 1..20: mol_type = other DNA; note = chemically synthesized
ttaaccaatggacaaaagct

SEQ ID NO: 154093 - DNA, 20 bp, synthetic construct
  source 1..20: mol_type = other DNA; note = chemically synthesized
cttaaccaatggacaaaagc

SEQ ID NO: 154094-154100 - skipped (7 entries)

SEQ ID NO: 154101 - DNA, 20 bp, synthetic construct
  source 1..20: mol_type = other DNA; note = chemically synthesized
gctggggaggagattatctc

SEQ ID NO: 154102-154106 - skipped (5 entries)

SEQ ID NO: 154107 - DNA, 20 bp, synthetic construct
  source 1..20: mol_type = other DNA; note = chemically synthesized
gcagagcaggctggaagctg

SEQ ID NO: 154108 - skipped

SEQ ID NO: 154109 - DNA, 20 bp, synthetic construct
  source 1..20: mol_type = other DNA; note = chemically synthesized
ttgcagagcaggctggaagc

SEQ ID NO: 154110-154112 - skipped (3 entries)

SEQ ID NO: 154113 - DNA, 20 bp, synthetic construct
  source 1..20: mol_type = other DNA; note = chemically synthesized
agctctcccacttgcagagc

SEQ ID NO: 154114 - skipped

SEQ ID NO: 154115 - DNA, 20 bp, synthetic construct
  source 1..20: mol_type = other DNA; note = chemically synthesized
cttccagcctgctctgcaag

SEQ ID NO: 154116-154131 - skipped (16 entries)

SEQ ID NO: 154132 - DNA, 20 bp, synthetic construct
  source 1..20: mol_type = other DNA; note = chemically synthesized
tacaggcagagaaaggactc

SEQ ID NO: 154133-154135 - skipped (3 entries)

SEQ ID NO: 154136 - DNA, 20 bp, synthetic construct
  source 1..20: mol_type = other DNA; note = chemically synthesized
aaggactcaggaagactcac

SEQ ID NO: 154137-154148 - skipped (12 entries)

SEQ ID NO: 154149 - DNA, 20 bp, synthetic construct
  source 1..20: mol_type = other DNA; note = chemically synthesized
tataggaaggctgagtgcta

SEQ ID NO: 154150-154151 - skipped (2 entries)

SEQ ID NO: 154152 - DNA, 20 bp, synthetic construct
  source 1..20: mol_type = other DNA; note = chemically synthesized
taggaaggctgagtgctaag

SEQ ID NO: 154153 - skipped

SEQ ID NO: 154154 - DNA, 20 bp, synthetic construct
  source 1..20: mol_type = other DNA; note = chemically synthesized
ggctgagtgctaaggggaaa

SEQ ID NO: 154155-154158 - skipped (4 entries)

SEQ ID NO: 154159 - DNA, 20 bp, synthetic construct
  source 1..20: mol_type = other DNA; note = chemically synthesized
ggaaatgggtagcccactaa

SEQ ID NO: 154160 - DNA, 20 bp, synthetic construct
  source 1..20: mol_type = other DNA; note = chemically synthesized
agatagatttgacccttagt

SEQ ID NO: 154161-154176 - skipped (16 entries)

SEQ ID NO: 154177 - DNA, 20 bp, synthetic construct
  source 1..20: mol_type = other DNA; note = chemically synthesized
acagccatgtccctttattt

SEQ ID NO: 154178 - skipped

SEQ ID NO: 154179 - DNA, 20 bp, synthetic construct
  source 1..20: mol_type = other DNA; note = chemically synthesized
cacagacaatacctaaataa

SEQ ID NO: 154180-154192 - skipped (13 entries)

SEQ ID NO: 154193 - DNA, 20 bp, synthetic construct
  source 1..20: mol_type = other DNA; note = chemically synthesized
aagcagaaaatatctagtat

SEQ ID NO: 154194-154237 - skipped (44 entries)

SEQ ID NO: 154238 - DNA, 20 bp, synthetic construct
  source 1..20: mol_type = other DNA; note = chemically synthesized
tcaactagaaaactctgggc

SEQ ID NO: 154239-154369 - skipped (131 entries)

SEQ ID NO: 154370 - DNA, 20 bp, synthetic construct
  source 1..20: mol_type = other DNA; note = chemically synthesized
ttctcaggcccagcagcttg

SEQ ID NO: 154371-154380 - skipped (10 entries)

SEQ ID NO: 154381 - DNA, 20 bp, synthetic construct
  source 1..20: mol_type = other DNA; note = chemically synthesized
aaggcttgcatggcagatgg

SEQ ID NO: 154382-154387 - skipped (6 entries)

SEQ ID NO: 154388 - DNA, 20 bp, synthetic construct
  source 1..20: mol_type = other DNA; note = chemically synthesized
aggactttgcatgggtctga

SEQ ID NO: 154389-154414 - skipped (26 entries)

SEQ ID NO: 154415 - DNA, 20 bp, synthetic construct
  source 1..20: mol_type = other DNA; note = chemically synthesized
gcagagctgttcagtgttcc

SEQ ID NO: 154416-154422 - skipped (7 entries)

SEQ ID NO: 154423 - DNA, 20 bp, synthetic construct
  source 1..20: mol_type = other DNA; note = chemically synthesized
tctgcagggcaaatactgcc

SEQ ID NO: 154424-154436 - skipped (13 entries)

SEQ ID NO: 154437 - DNA, 20 bp, synthetic construct
  source 1..20: mol_type = other DNA; note = chemically synthesized
ttctaagctataacatcctc

SEQ ID NO: 154438 - skipped

SEQ ID NO: 154439 - DNA, 20 bp, synthetic construct
  source 1..20: mol_type = other DNA; note = chemically synthesized
aagctataacatcctcgggg

SEQ ID NO: 154440 - skipped

SEQ ID NO: 154441 - DNA, 20 bp, synthetic construct
  source 1..20: mol_type = other DNA; note = chemically synthesized
gctataacatcctcggggtg

SEQ ID NO: 154442-154455 - skipped (14 entries)

SEQ ID NO: 154456 - DNA, 20 bp, synthetic construct
  source 1..20: mol_type = other DNA; note = chemically synthesized
ccagtgctgtgaatgctaaa

SEQ ID NO: 154457-154466 - skipped (10 entries)

SEQ ID NO: 154467 - DNA, 20 bp, synthetic construct
  source 1..20: mol_type = other DNA; note = chemically synthesized
cccttctgctgtgtgcagca

SEQ ID NO: 154468-154473 - skipped (6 entries)

SEQ ID NO: 154474 - DNA, 20 bp, synthetic construct
  source 1..20: mol_type = other DNA; note = chemically synthesized
ccttgctgcacacagcagaa

SEQ ID NO: 154475-154486 - skipped (12 entries)

SEQ ID NO: 154487 - DNA, 20 bp, synthetic construct
  source 1..20: mol_type = other DNA; note = chemically synthesized
ggtagtagttctcaaagcat

SEQ ID NO: 154488-154490 - skipped (3 entries)

SEQ ID NO: 154491 - DNA, 20 bp, synthetic construct
  source 1..20: mol_type = other DNA; note = chemically synthesized
ttcctaggttatgctgatgc

SEQ ID NO: 154492 - skipped

SEQ ID NO: 154493 - DNA, 20 bp, synthetic construct
  source 1..20: mol_type = other DNA; note = chemically synthesized
ggccagcatcagcataacct

SEQ ID NO: 154494 - DNA, 20 bp, synthetic construct
  source 1..20: mol_type = other DNA; note = chemically synthesized
tgcatctctgaaaagttcct

SEQ ID NO: 154495-154501 - skipped (7 entries)

SEQ ID NO: 154502 - DNA, 20 bp, synthetic construct
  source 1..20: mol_type = other DNA; note = chemically synthesized
cagagatgcaagtcttggct

SEQ ID NO: 154503-154612 - skipped (110 entries)

SEQ ID NO: 154613 - DNA, 20 bp, synthetic construct
  source 1..20: mol_type = other DNA; note = chemically synthesized
gtttctgatttactagctct

SEQ ID NO: 154614-154629 - skipped (16 entries)

SEQ ID NO: 154630 - DNA, 20 bp, synthetic construct
  source 1..20: mol_type = other DNA; note = chemically synthesized
tctatactttgcgaagaact

SEQ ID NO: 154631-154646 - skipped (16 entries)

SEQ ID NO: 154647 - DNA, 20 bp, synthetic construct
  source 1..20: mol_type = other DNA; note = chemically synthesized
aaatcactacattggggaaa

SEQ ID NO: 154648-154660 - skipped (13 entries)

SEQ ID NO: 154661 - DNA, 20 bp, synthetic construct
  source 1..20: mol_type = other DNA; note = chemically synthesized
atgccacatcgcatatcaaa

SEQ ID NO: 154662-154694 - skipped (33 entries)

SEQ ID NO: 154695 - DNA, 20 bp, synthetic construct
  source 1..20: mol_type = other DNA; note = chemically synthesized
tacaagaccttctgatgcct

SEQ ID NO: 154696-154702 - skipped (7 entries)

SEQ ID NO: 154703 - DNA, 20 bp, synthetic construct
  source 1..20: mol_type = other DNA; note = chemically synthesized
gcagttttccaagagagggc

SEQ ID NO: 154704-154718 - skipped (15 entries)

SEQ ID NO: 154719 - DNA, 20 bp, synthetic construct
  source 1..20: mol_type = other DNA; note = chemically synthesized
atcatcctgtaggctagatt

SEQ ID NO: 154720-154721 - skipped (2 entries)

SEQ ID NO: 154722 - DNA, 20 bp, synthetic construct
  source 1..20: mol_type = other DNA; note = chemically synthesized
tgaagcctaatctagcctac

SEQ ID NO: 154723-154726 - skipped (4 entries)

SEQ ID NO: 154727 - DNA, 20 bp, synthetic construct
  source 1..20: mol_type = other DNA; note = chemically synthesized
ctagcctacaggatgatgag

SEQ ID NO: 154728-154735 - skipped (8 entries)

SEQ ID NO: 154736 - DNA, 20 bp, synthetic construct
  source 1..20: mol_type = other DNA; note = chemically synthesized
gatatctgacagctggctgt

SEQ ID NO: 154737-154965 - skipped (229 entries)

SEQ ID NO: 154966 - DNA, 20 bp, synthetic construct
  source 1..20: mol_type = other DNA; note = chemically synthesized
acagccacaaaacaaaacac

SEQ ID NO: 154967 - DNA, 20 bp, synthetic construct
  source 1..20: mol_type = other DNA; note = chemically synthesized
acaaaacaaaacacaggctg

SEQ ID NO: 154968-154969 - skipped (2 entries)

SEQ ID NO: 154970 - DNA, 20 bp, synthetic construct
  source 1..20: mol_type = other DNA; note = chemically synthesized
aggctgtggagcttgacatg

SEQ ID NO: 154971-154972 - skipped (2 entries)

SEQ ID NO: 154973 - DNA, 20 bp, synthetic construct
  source 1..20: mol_type = other DNA; note = chemically synthesized
gctagaaagcaagcaagcaa

SEQ ID NO: 154974-154995 - skipped (22 entries)

SEQ ID NO: 154996 - DNA, 20 bp, synthetic construct
  source 1..20: mol_type = other DNA; note = chemically synthesized
tttaaagattaaggagcctg

SEQ ID NO: 154997-155083 - skipped (87 entries)

SEQ ID NO: 155084 - DNA, 20 bp, synthetic construct
  source 1..20: mol_type = other DNA; note = chemically synthesized
gccctcagctcaaagctgtt

SEQ ID NO: 155085-155093 - skipped (9 entries)

SEQ ID NO: 155094 - DNA, 20 bp, synthetic construct
  source 1..20: mol_type = other DNA; note = chemically synthesized
cattcccagactctccatac

SEQ ID NO: 155095-155101 - skipped (7 entries)

SEQ ID NO: 155102 - DNA, 20 bp, synthetic construct
  source 1..20: mol_type = other DNA; note = chemically synthesized
ccatactggcagcaatgtgg

SEQ ID NO: 155103-155108 - skipped (6 entries)

SEQ ID NO: 155109 - DNA, 20 bp, synthetic construct
  source 1..20: mol_type = other DNA; note = chemically synthesized
gacataggagaagacaagag

SEQ ID NO: 155110-155132 - skipped (23 entries)

SEQ ID NO: 155133 - DNA, 20 bp, synthetic construct
  source 1..20: mol_type = other DNA; note = chemically synthesized
tgaaagatgagtatctctca

SEQ ID NO: 155134-155143 - skipped (10 entries)

SEQ ID NO: 155144 - DNA, 20 bp, synthetic construct
  source 1..20: mol_type = other DNA; note = chemically synthesized
atcagtgagactagaggagt

SEQ ID NO: 155145-155152 - skipped (8 entries)

SEQ ID NO: 155153 - DNA, 20 bp, synthetic construct
  source 1..20: mol_type = other DNA; note = chemically synthesized
aacaagatgacggaatatta

SEQ ID NO: 155154 - skipped

SEQ ID NO: 155155 - DNA, 20 bp, synthetic construct
  source 1..20: mol_type = other DNA; note = chemically synthesized
ctgaagtaggaacaagatga

SEQ ID NO: 155156-155169 - skipped (14 entries)

SEQ ID NO: 155170 - DNA, 20 bp, synthetic construct
  source 1..20: mol_type = other DNA; note = chemically synthesized
atttctgggaaaattattcc

SEQ ID NO: 155171-155172 - skipped (2 entries)

SEQ ID NO: 155173 - DNA, 20 bp, synthetic construct
  source 1..20: mol_type = other DNA; note = chemically synthesized
agtgagcctggtgtatttct

SEQ ID NO: 155174 - DNA, 20 bp, synthetic construct
  source 1..20: mol_type = other DNA; note = chemically synthesized
aagtgagcctggtgtatttc

SEQ ID NO: 155175 - skipped

SEQ ID NO: 155176 - DNA, 20 bp, synthetic construct
  source 1..20: mol_type = other DNA; note = chemically synthesized
aattttcccagaaatacacc

SEQ ID NO: 155177-155189 - skipped (13 entries)

SEQ ID NO: 155190 - DNA, 20 bp, synthetic construct
  source 1..20: mol_type = other DNA; note = chemically synthesized
tattgtctatagtgtggtca

SEQ ID NO: 155191-155199 - skipped (9 entries)

SEQ ID NO: 155200 - DNA, 20 bp, synthetic construct
  source 1..20: mol_type = other DNA; note = chemically synthesized
agaacaactaagcagggaga

SEQ ID NO: 155201-155202 - skipped (2 entries)

SEQ ID NO: 155203 - DNA, 20 bp, synthetic construct
  source 1..20: mol_type = other DNA; note = chemically synthesized
ttacagagaacaactaagca

SEQ ID NO: 155204-155212 - skipped (9 entries)

SEQ ID NO: 155213 - DNA, 20 bp, synthetic construct
  source 1..20: mol_type = other DNA; note = chemically synthesized
tctcaaatgtcagtgtgcac

SEQ ID NO: 155214 - skipped

SEQ ID NO: 155215 - DNA, 20 bp, synthetic construct
  source 1..20: mol_type = other DNA; note = chemically synthesized
agtgtgcacaggattcacct

SEQ ID NO: 155216 - DNA, 20 bp, synthetic construct
  source 1..20: mol_type = other DNA; note = chemically synthesized
gtgtgcacaggattcacctg

SEQ ID NO: 155217-155224 - skipped (8 entries)

SEQ ID NO: 155225 - DNA, 20 bp, synthetic construct
  source 1..20: mol_type = other DNA; note = chemically synthesized
gattgtgattcagtgggtct

SEQ ID NO: 155226-155231 - skipped (6 entries)

SEQ ID NO: 155232 - DNA, 20 bp, synthetic construct
  source 1..20: mol_type = other DNA; note = chemically synthesized
tgttagacacacagaatctg

SEQ ID NO: 155233-155236 - skipped (4 entries)

SEQ ID NO: 155237 - DNA, 20 bp, synthetic construct
  source 1..20: mol_type = other DNA; note = chemically synthesized
agtctacagattgatgtcaa

SEQ ID NO: 155238-155273 - skipped (36 entries)

SEQ ID NO: 155274 - DNA, 20 bp, synthetic construct
  source 1..20: mol_type = other DNA; note = chemically synthesized
tgtttataagaaaaatacat

SEQ ID NO: 155275-155281 - skipped (7 entries)

SEQ ID NO: 155282 - DNA, 20 bp, synthetic construct
  source 1..20: mol_type = other DNA; note = chemically synthesized
ggatttcggcgccctggttt

SEQ ID NO: 155283 - DNA, 20 bp, synthetic construct
  source 1..20: mol_type = other DNA; note = chemically synthesized
gtaggaaggctccaaaacca

SEQ ID NO: 155284 - skipped

SEQ ID NO: 155285 - DNA, 20 bp, synthetic construct
  source 1..20: mol_type = other DNA; note = chemically synthesized
ggtaggaaggctccaaaacc

SEQ ID NO: 155286-155313 - skipped (28 entries)

SEQ ID NO: 155314 - DNA, 20 bp, synthetic construct
  source 1..20: mol_type = other DNA; note = chemically synthesized
gttttctggctgtctctggt

SEQ ID NO: 155315-155322 - skipped (8 entries)

SEQ ID NO: 155323 - DNA, 20 bp, synthetic construct
  source 1..20: mol_type = other DNA; note = chemically synthesized
acaccaataaatgataacat

SEQ ID NO: 155324-155325 - skipped (2 entries)

SEQ ID NO: 155326 - DNA, 20 bp, synthetic construct
  source 1..20: mol_type = other DNA; note = chemically synthesized
caaactatgcatatgcgctg

SEQ ID NO: 155327-155366 - skipped (40 entries)

SEQ ID NO: 155367 - DNA, 20 bp, synthetic construct
  source 1..20: mol_type = other DNA; note = chemically synthesized
atgcactgtccccagattgt

SEQ ID NO: 155368 - DNA, 20 bp, synthetic construct
  source 1..20: mol_type = other DNA; note = chemically synthesized
taaaagaagccctacaatct

SEQ ID NO: 155369 - skipped

SEQ ID NO: 155370 - DNA, 20 bp, synthetic construct
  source 1..20: mol_type = other DNA; note = chemically synthesized
ttaaaagaagccctacaatc

SEQ ID NO: 155371-155396 - skipped (26 entries)

SEQ ID NO: 155397 - DNA, 20 bp, synthetic construct
  source 1..20: mol_type = other DNA; note = chemically synthesized
atgattgaagcattaaagca

SEQ ID NO: 155398-155429 - skipped (32 entries)

SEQ ID NO: 155430 - DNA, 20 bp, synthetic construct
  source 1..20: mol_type = other DNA; note = chemically synthesized
tctcatggcaatgttaatgc

SEQ ID NO: 155431-155437 - skipped (7 entries)

SEQ ID NO: 155438 - DNA, 20 bp, synthetic construct
  source 1..20: mol_type = other DNA; note = chemically synthesized
ccttctatcaacaactgaag

SEQ ID NO: 155439-155455 - skipped (17 entries)

SEQ ID NO: 155456 - DNA, 20 bp, synthetic construct
  source 1..20: mol_type = other DNA; note = chemically synthesized
ggaggaccacaagctgactt

SEQ ID NO: 155457 - DNA, 20 bp, synthetic construct
  source 1..20: mol_type = other DNA; note = chemically synthesized
gggaggaccacaagctgact

SEQ ID NO: 155458 - DNA, 20 bp, synthetic construct
  source 1..20: mol_type = other DNA; note = chemically synthesized
tcctcccccaagtcagcttg

SEQ ID NO: 155459-155462 - skipped (4 entries)

SEQ ID NO: 155463 - DNA, 20 bp, synthetic construct
  source 1..20: mol_type = other DNA; note = chemically synthesized
caagaaaaagaaaaatggat

SEQ ID NO: 155464-155493 - skipped (30 entries)

SEQ ID NO: 155494 - DNA, 20 bp, synthetic construct
  source 1..20: mol_type = other DNA; note = chemically synthesized
gtgtgcattgttcctgaaga

SEQ ID NO: 155495-155497 - skipped (3 entries)

SEQ ID NO: 155498 - DNA, 20 bp, synthetic construct
  source 1..20: mol_type = other DNA; note = chemically synthesized
aggaacaatgcacacatccc

SEQ ID NO: 155499-155514 - skipped (16 entries)

SEQ ID NO: 155515 - DNA, 20 bp, synthetic construct
  source 1..20: mol_type = other DNA; note = chemically synthesized
caacttggacaagttttctg

SEQ ID NO: 155516-155523 - skipped (8 entries)

SEQ ID NO: 155524 - DNA, 20 bp, synthetic construct
  source 1..20: mol_type = other DNA; note = chemically synthesized
ggctggctgctgcctgagag

SEQ ID NO: 155525-155529 - skipped (5 entries)

SEQ ID NO: 155530 - DNA, 20 bp, synthetic construct
  source 1..20: mol_type = other DNA; note = chemically synthesized
ctcaggcagcagccagcccc

SEQ ID NO: 155531 - DNA, 20 bp, synthetic construct
  source 1..20: mol_type = other DNA; note = chemically synthesized
gccagccattggccaggggc

SEQ ID NO: 155532 - DNA, 20 bp, synthetic construct
  source 1..20: mol_type = other DNA; note = chemically synthesized
tccagccagccattggccag

SEQ ID NO: 155533 - DNA, 20 bp, synthetic construct
  source 1..20: mol_type = other DNA; note = chemically synthesized
agcagccagcccctggccaa

SEQ ID NO: 155534 - skipped

SEQ ID NO: 155535 - DNA, 20 bp, synthetic construct
  source 1..20: mol_type = other DNA; note = chemically synthesized
gatccagccagccattggcc

SEQ ID NO: 155536-155544 - skipped (9 entries)

SEQ ID NO: 155545 - DNA, 20 bp, synthetic construct
  source 1..20: mol_type = other DNA; note = chemically synthesized
ctggctggatcaggaataca

SEQ ID NO: 155546-155548 - skipped (3 entries)

SEQ ID NO: 155549 - DNA, 20 bp, synthetic construct
  source 1..20: mol_type = other DNA; note = chemically synthesized
tgaattgcaggcagtgggcc

SEQ ID NO: 155550 - DNA, 20 bp, synthetic construct
  source 1..20: mol_type = other DNA; note = chemically synthesized
tgtcctgaattgcaggcagt

SEQ ID NO: 155551 - DNA, 20 bp, synthetic construct
  source 1..20: mol_type = other DNA; note = chemically synthesized
ctgtcctgaattgcaggcag

SEQ ID NO: 155552-155553 - skipped (2 entries)

SEQ ID NO: 155554 - DNA, 20 bp, synthetic construct
  source 1..20: mol_type = other DNA; note = chemically synthesized
aggcccactgcctgcaattc

SEQ ID NO: 155555 - DNA, 20 bp, synthetic construct
  source 1..20: mol_type = other DNA; note = chemically synthesized
gcagagctgtcctgaattgc

SEQ ID NO: 155556-155562 - skipped (7 entries)

SEQ ID NO: 155563 - DNA, 20 bp, synthetic construct
  source 1..20: mol_type = other DNA; note = chemically synthesized
caggagccctacatctgggc

SEQ ID NO: 155564 - skipped

SEQ ID NO: 155565 - DNA, 20 bp, synthetic construct
  source 1..20: mol_type = other DNA; note = chemically synthesized
tgcacagccagcccagatgt

SEQ ID NO: 155566 - DNA, 20 bp, synthetic construct
  source 1..20: mol_type = other DNA; note = chemically synthesized
gcacagccagcccagatgta

SEQ ID NO: 155567 - DNA, 20 bp, synthetic construct
  source 1..20: mol_type = other DNA; note = chemically synthesized
ctcgcaggagccctacatct

SEQ ID NO: 155568 - DNA, 20 bp, synthetic construct
  source 1..20: mol_type = other DNA; note = chemically synthesized
tctcgcaggagccctacatc

SEQ ID NO: 155569-155602 - skipped (34 entries)

SEQ ID NO: 155603 - DNA, 20 bp, synthetic construct
  source 1..20: mol_type = other DNA; note = chemically synthesized
gggatatggggagtgttctc

SEQ ID NO: 155604-155605 - skipped (2 entries)

SEQ ID NO: 155606 - DNA, 20 bp, synthetic construct
  source 1..20: mol_type = other DNA; note = chemically synthesized
gttgcatgacaacgggatat

SEQ ID NO: 155607 - DNA, 20 bp, synthetic construct
  source 1..20: mol_type = other DNA; note = chemically synthesized
tgttgcatgacaacgggata

SEQ ID NO: 155608 - DNA, 20 bp, synthetic construct
  source 1..20: mol_type = other DNA; note = chemically synthesized
tcaaagtgttgcatgacaac

SEQ ID NO: 155609-155683 - skipped (75 entries)

SEQ ID NO: 155684 - DNA, 20 bp, synthetic construct
  source 1..20: mol_type = other DNA; note = chemically synthesized
ttttctgttaaagaggaagt

SEQ ID NO: 155685 - DNA, 20 bp, synthetic construct
  source 1..20: mol_type = other DNA; note = chemically synthesized
atgcttttctgttaaagagg

SEQ ID NO: 155686 - DNA, 20 bp, synthetic construct
  source 1..20: mol_type = other DNA; note = chemically synthesized
tcttctaacttcctctttaa

SEQ ID NO: 155687 - DNA, 20 bp, synthetic construct
  source 1..20: mol_type = other DNA; note = chemically synthesized
tgtatgcttttctgttaaag

SEQ ID NO: 155688 - DNA, 20 bp, synthetic construct
  source 1..20: mol_type = other DNA; note = chemically synthesized
gtgtatgcttttctgttaaa

SEQ ID NO: 155689 - DNA, 20 bp, synthetic construct
  source 1..20: mol_type = other DNA; note = chemically synthesized
atgtgtatgcttttctgtta

SEQ ID NO: 155690-178867 - skipped (23178 entries)

SEQ ID NO: 178868 - DNA, 20 bp, synthetic construct
  source 1..20: mol_type = other DNA; note = chemically synthesized
aagatattcttttgttcttc

SEQ ID NO: 178869 - DNA, 20 bp, synthetic construct
  source 1..20: mol_type = other DNA; note = chemically synthesized
attcttttgttcttctagcc

SEQ ID NO: 178870 - DNA, 20 bp, synthetic construct
  source 1..20: mol_type = other DNA; note = chemically synthesized
ttcttctttctccaggctag

SEQ ID NO: 178871 - DNA, 20 bp, synthetic construct
  source 1..20: mol_type = other DNA; note = chemically synthesized
tcttttgttcttctagcctg

SEQ ID NO: 178872 - DNA, 20 bp, synthetic construct
  source 1..20: mol_type = other DNA; note = chemically synthesized
ttattcttctttctccaggc

SEQ ID NO: 178873 - DNA, 20 bp, synthetic construct
  source 1..20: mol_type = other DNA; note = chemically synthesized
ttgttcttctagcctggaga

SEQ ID NO: 178874 - DNA, 20 bp, synthetic construct
  source 1..20: mol_type = other DNA; note = chemically synthesized
aattttattcttctttctcc

SEQ ID NO: 178875 - DNA, 20 bp, synthetic construct
  source 1..20: mol_type = other DNA; note = chemically synthesized
ttcttctagcctggagaaag

SEQ ID NO: 178876 - DNA, 20 bp, synthetic construct
  source 1..20: mol_type = other DNA; note = chemically synthesized
caattttattcttctttctc

SEQ ID NO: 178877-180174 - skipped (1298 entries)

SEQ ID NO: 180175 - DNA, 20 bp, synthetic construct
  source 1..20: mol_type = other DNA; note = chemically synthesized
tataagttgacccttcccga

SEQ ID NO: 180176-180191 - skipped (16 entries)

SEQ ID NO: 180192 - DNA, 20 bp, synthetic construct
  source 1..20: mol_type = other DNA; note = chemically synthesized
ataatgacctacggagggta

SEQ ID NO: 180193 - skipped

SEQ ID NO: 180194 - DNA, 20 bp, synthetic construct
  source 1..20: mol_type = other DNA; note = chemically synthesized
cctcaggccataccctccgt

SEQ ID NO: 180195 - skipped

SEQ ID NO: 180196 - DNA, 20 bp, synthetic construct
  source 1..20: mol_type = other DNA; note = chemically synthesized
attctgataatgacctacgg

SEQ ID NO: 180197-180206 - skipped (10 entries)

SEQ ID NO: 180207 - DNA, 20 bp, synthetic construct
  source 1..20: mol_type = other DNA; note = chemically synthesized
gccaacatgtctaccatacc

SEQ ID NO: 180208-180264 - skipped (57 entries)

SEQ ID NO: 180265 - DNA, 20 bp, synthetic construct
  source 1..20: mol_type = other DNA; note = chemically synthesized
atcagctgagtacgtgaaca

SEQ ID NO: 180266 - DNA, 20 bp, synthetic construct
  source 1..20: mol_type = other DNA; note = chemically synthesized
tcagctgagtacgtgaacac

SEQ ID NO: 180267-180354 - skipped (88 entries)

SEQ ID NO: 180355 - DNA, 20 bp, synthetic construct
  source 1..20: mol_type = other DNA; note = chemically synthesized
cacctagaagtagtctcatc

SEQ ID NO: 180356-180370 - skipped (15 entries)

SEQ ID NO: 180371 - DNA, 20 bp, synthetic construct
  source 1..20: mol_type = other DNA; note = chemically synthesized
gatattcacggccatatcaa

SEQ ID NO: 180372 - DNA, 20 bp, synthetic construct
  source 1..20: mol_type = other DNA; note = chemically synthesized
attgatatggccgtgaatat

SEQ ID NO: 180373 - DNA, 20 bp, synthetic construct
  source 1..20: mol_type = other DNA; note = chemically synthesized
gggattgctgccgatattca

SEQ ID NO: 180374-180380 - skipped (7 entries)

SEQ ID NO: 180381 - DNA, 20 bp, synthetic construct
  source 1..20: mol_type = other DNA; note = chemically synthesized
cttcctcccaatcggatgta

SEQ ID NO: 180382-180385 - skipped (4 entries)

SEQ ID NO: 180386 - DNA, 20 bp, synthetic construct
  source 1..20: mol_type = other DNA; note = chemically synthesized
ggaccttacatccgattggg

SEQ ID NO: 180387-180388 - skipped (2 entries)

SEQ ID NO: 180389 - DNA, 20 bp, synthetic construct
  source 1..20: mol_type = other DNA; note = chemically synthesized
cttacatccgattgggagga

SEQ ID NO: 180390-180437 - skipped (48 entries)

SEQ ID NO: 180438 - DNA, 20 bp, synthetic construct
  source 1..20: mol_type = other DNA; note = chemically synthesized
tgagcaaagtcctcgtggta

SEQ ID NO: 180439 - DNA, 20 bp, synthetic construct
  source 1..20: mol_type = other DNA; note = chemically synthesized
gctagccagtccctaccacg

SEQ ID NO: 180440-180504 - skipped (65 entries)

SEQ ID NO: 180505 - DNA, 20 bp, synthetic construct
  source 1..20: mol_type = other DNA; note = chemically synthesized
gccacaaaagcgaagtgccc

SEQ ID NO: 180506-180515 - skipped (10 entries)

SEQ ID NO: 180516 - DNA, 20 bp, synthetic construct
  source 1..20: mol_type = other DNA; note = chemically synthesized
ggcccccctgatccaccatt

SEQ ID NO: 180517-180608 - skipped (92 entries)

SEQ ID NO: 180609 - DNA, 20 bp, synthetic construct
  source 1..20: mol_type = other DNA; note = chemically synthesized
aactgaattcgatgtgggat

SEQ ID NO: 180610-180611 - skipped (2 entries)

SEQ ID NO: 180612 - DNA, 20 bp, synthetic construct
  source 1..20: mol_type = other DNA; note = chemically synthesized
cccagaaactgaattcgatg

SEQ ID NO: 180613-180629 - skipped (17 entries)

SEQ ID NO: 180630 - DNA, 20 bp, synthetic construct
  source 1..20: mol_type = other DNA; note = chemically synthesized
ctagggctcagttagttgat

SEQ ID NO: 180631-180694 - skipped (64 entries)

SEQ ID NO: 180695 - DNA, 20 bp, synthetic construct
  source 1..20: mol_type = other DNA; note = chemically synthesized
acagaggagcacgtttaggc

SEQ ID NO: 180696-180729 - skipped (34 entries)

SEQ ID NO: 180730 - DNA, 20 bp, synthetic construct
  source 1..20: mol_type = other DNA; note = chemically synthesized
catgcttattgatacgctct

SEQ ID NO: 180731 - DNA, 20 bp, synthetic construct
  source 1..20: mol_type = other DNA; note = chemically synthesized
acatgcttattgatacgctc

SEQ ID NO: 180732-180765 - skipped (34 entries)

SEQ ID NO: 180766 - DNA, 20 bp, synthetic construct
  source 1..20: mol_type = other DNA; note = chemically synthesized
aaacctgtacgtatactacc

SEQ ID NO: 180767 - skipped

SEQ ID NO: 180768 - DNA, 20 bp, synthetic construct
  source 1..20: mol_type = other DNA; note = chemically synthesized
gatccaggtagtatacgtac

SEQ ID NO: 180769-180839 - skipped (71 entries)

SEQ ID NO: 180840 - DNA, 20 bp, synthetic construct
  source 1..20: mol_type = other DNA; note = chemically synthesized
catacagtcacgccttttgt

SEQ ID NO: 180841-181029 - skipped (189 entries)

SEQ ID NO: 181030 - DNA, 20 bp, synthetic construct
  source 1..20: mol_type = other DNA; note = chemically synthesized
ccaacccaggtataggtcac

SEQ ID NO: 181031 - skipped

SEQ ID NO: 181032 - DNA, 20 bp, synthetic construct
  source 1..20: mol_type = other DNA; note = chemically synthesized
gggctgtgggactacataac

SEQ ID NO: 181033-181159 - skipped (127 entries)

SEQ ID NO: 181160 - DNA, 20 bp, synthetic construct
  source 1..20: mol_type = other DNA; note = chemically synthesized
ttcatgacttcgcataccac

SEQ ID NO: 181161-181239 - skipped (79 entries)

SEQ ID NO: 181240 - DNA, 20 bp, synthetic construct
  source 1..20: mol_type = other DNA; note = chemically synthesized
tggaaagaattactaccacg

SEQ ID NO: 181241-181657 - skipped (417 entries)

SEQ ID NO: 181658 - DNA, 20 bp, synthetic construct
  source 1..20: mol_type = other DNA; note = chemically synthesized
cataagctacgtgtatggac

SEQ ID NO: 181659 - skipped

SEQ ID NO: 181660 - DNA, 20 bp, synthetic construct
  source 1..20: mol_type = other DNA; note = chemically synthesized
gacaccataagctacgtgta

SEQ ID NO: 181661 - DNA, 20 bp, synthetic construct
  source 1..20: mol_type = other DNA; note = chemically synthesized
cagtccatacacgtagctta

SEQ ID NO: 181662-182054 - skipped (393 entries)

SEQ ID NO: 182055 - DNA, 20 bp, synthetic construct
  source 1..20: mol_type = other DNA; note = chemically synthesized
gtatttaaggtgtacacgat

SEQ ID NO: 182056-182058 - skipped (3 entries)

SEQ ID NO: 182059 - DNA, 20 bp, synthetic construct
  source 1..20: mol_type = other DNA; note = chemically synthesized
caaaccatcgtagtcagtcg

SEQ ID NO: 182060 - DNA, 20 bp, synthetic construct
  source 1..20: mol_type = other DNA; note = chemically synthesized
tcaaaccatcgtagtcagtc

SEQ ID NO: 182061 - DNA, 20 bp, synthetic construct
  source 1..20: mol_type = other DNA; note = chemically synthesized
gtcaaaccatcgtagtcagt

SEQ ID NO: 182062 - DNA, 20 bp, synthetic construct
  source 1..20: mol_type = other DNA; note = chemically synthesized
tcttccccgactgactacga

SEQ ID NO: 182063-182399 - skipped (337 entries)

SEQ ID NO: 182400 - DNA, 20 bp, synthetic construct
  source 1..20: mol_type = other DNA; note = chemically synthesized
aacatctgctaagatgtcga

SEQ ID NO: 182401-183053 - skipped (653 entries)

SEQ ID NO: 183054 - DNA, 20 bp, synthetic construct
  source 1..20: mol_type = other DNA; note = chemically synthesized
caaaatgaggcagccgtaat

SEQ ID NO: 183055-183119 - skipped (65 entries)

SEQ ID NO: 183120 - DNA, 20 bp, synthetic construct
  source 1..20: mol_type = other DNA; note = chemically synthesized
actattatgcttgaccaagc

SEQ ID NO: 183121-183143 - skipped (23 entries)

SEQ ID NO: 183144 - DNA, 20 bp, synthetic construct
  source 1..20: mol_type = other DNA; note = chemically synthesized
tatgccgttggttgatatcc

SEQ ID NO: 183145-183268 - skipped (124 entries)

SEQ ID NO: 183269 - DNA, 20 bp, synthetic construct
  source 1..20: mol_type = other DNA; note = chemically synthesized
ttaacgaatatgggtcacgt

SEQ ID NO: 183270 - DNA, 20 bp, synthetic construct
  source 1..20: mol_type = other DNA; note = chemically synthesized
tttaacgaatatgggtcacg

SEQ ID NO: 183271-183310 - skipped (40 entries)

SEQ ID NO: 183311 - DNA, 20 bp, synthetic construct
  source 1..20: mol_type = other DNA; note = chemically synthesized
gtgaatgtggatacggtttc

SEQ ID NO: 183312-183532 - skipped (221 entries)

SEQ ID NO: 183533 - DNA, 20 bp, synthetic construct
  source 1..20: mol_type = other DNA; note = chemically synthesized
agcagctaatagtgacgaca

SEQ ID NO: 183534 - DNA, 20 bp, synthetic construct
  source 1..20: mol_type = other DNA; note = chemically synthesized
aagcagctaatagtgacgac

SEQ ID NO: 183535-183580 - skipped (46 entries)

SEQ ID NO: 183581 - DNA, 20 bp, synthetic construct
  source 1..20: mol_type = other DNA; note = chemically synthesized
gcttatgatctcgaagagtc

SEQ ID NO: 183582-183733 - skipped (152 entries)

SEQ ID NO: 183734 - DNA, 20 bp, synthetic construct
  source 1..20: mol_type = other DNA; note = chemically synthesized
atctgccagtaggtagtccg

SEQ ID NO: 183735 - skipped

SEQ ID NO: 183736 - DNA, 20 bp, synthetic construct
  source 1..20: mol_type = other DNA; note = chemically synthesized
accaacctcggactacctac

SEQ ID NO: 183737-183810 - skipped (74 entries)

SEQ ID NO: 183811 - DNA, 20 bp, synthetic construct
  source 1..20: mol_type = other DNA; note = chemically synthesized
acactttccgtattagcact

SEQ ID NO: 183812-183818 - skipped (7 entries)

SEQ ID NO: 183819 - DNA, 20 bp, synthetic construct
  source 1..20: mol_type = other DNA; note = chemically synthesized
atcttagtcctattatccgt

SEQ ID NO: 183820-183821 - skipped (2 entries)

SEQ ID NO: 183822 - DNA, 20 bp, synthetic construct
  source 1..20: mol_type = other DNA; note = chemically synthesized
gcacatggcctacggataat

SEQ ID NO: 183823-184428 - skipped (606 entries)

SEQ ID NO: 184429 - DNA, 20 bp, synthetic construct
  source 1..20: mol_type = other DNA; note = chemically synthesized
gtaagtggataggcggtttt

SEQ ID NO: 184430-184953 - skipped (524 entries)

SEQ ID NO: 184954 - DNA, 20 bp, synthetic construct
  source 1..20: mol_type = other DNA; note = chemically synthesized
aattcttttgctactacgtg

SEQ ID NO: 184955-184957 - skipped (3 entries)

SEQ ID NO: 184958 - DNA, 20 bp, synthetic construct
  source 1..20: mol_type = other DNA; note = chemically synthesized
ctactacgtgtggccatcaa

SEQ ID NO: 184959-184986 - skipped (28 entries)

SEQ ID NO: 184987 - DNA, 20 bp, synthetic construct
  source 1..20: mol_type = other DNA; note = chemically synthesized
atctagagtaaggactccgg

SEQ ID NO: 184988-185165 - skipped (178 entries)

SEQ ID NO: 185166 - DNA, 20 bp, synthetic construct
  source 1..20: mol_type = other DNA; note = chemically synthesized
caagcggacgggacagatcc

SEQ ID NO: 185167-185179 - skipped (13 entries)

SEQ ID NO: 185180 - DNA, 20 bp, synthetic construct
  source 1..20: mol_type = other DNA; note = chemically synthesized
actggttcacacggatatac

SEQ ID NO: 185181 - DNA, 20 bp, synthetic construct
  source 1..20: mol_type = other DNA; note = chemically synthesized
ctggttcacacggatatact

SEQ ID NO: 185182-185318 - skipped (137 entries)

SEQ ID NO: 185319 - DNA, 20 bp, synthetic construct
  source 1..20: mol_type = other DNA; note = chemically synthesized
gtacgtagaaacgtacatct

SEQ ID NO: 185320 - DNA, 20 bp, synthetic construct
  source 1..20: mol_type = other DNA; note = chemically synthesized
agtacgtagaaacgtacatc

SEQ ID NO: 185321-185601 - skipped (281 entries)

SEQ ID NO: 185602 - DNA, 20 bp, synthetic construct
  source 1..20: mol_type = other DNA; note = chemically synthesized
ataccagtcgaggggttctg

SEQ ID NO: 185603 - DNA, 20 bp, synthetic construct
  source 1..20: mol_type = other DNA; note = chemically synthesized
cataccagtcgaggggttct

SEQ ID NO: 185604 - DNA, 20 bp, synthetic construct
  source 1..20: mol_type = other DNA; note = chemically synthesized
acataccagtcgaggggttc

SEQ ID NO: 185605 - skipped

SEQ ID NO: 185606 - DNA, 20 bp, synthetic construct
  source 1..20: mol_type = other DNA; note = chemically synthesized
gagaagacataccagtcgag

SEQ ID NO: 185607 - DNA, 20 bp, synthetic construct
  source 1..20: mol_type = other DNA; note = chemically synthesized
ggagaagacataccagtcga

SEQ ID NO: 185608 - DNA, 20 bp, synthetic construct
  source 1..20: mol_type = other DNA; note = chemically synthesized
aggagaagacataccagtcg

SEQ ID NO: 185609-185717 - skipped (109 entries)

SEQ ID NO: 185718 - DNA, 20 bp, synthetic construct
  source 1..20: mol_type = other DNA; note = chemically synthesized
aacctatcatcggctgtaag

SEQ ID NO: 185719 - DNA, 20 bp, synthetic construct
  source 1..20: mol_type = other DNA; note = chemically synthesized
aaacctatcatcggctgtaa

SEQ ID NO: 185720 - DNA, 20 bp, synthetic construct
  source 1..20: mol_type = other DNA; note = chemically synthesized
aaaacctatcatcggctgta

SEQ ID NO: 185721-185722 - skipped (2 entries)

SEQ ID NO: 185723 - DNA, 20 bp, synthetic construct
  source 1..20: mol_type = other DNA; note = chemically synthesized
ttccccttacagccgatgat

SEQ ID NO: 185724-186024 - skipped (301 entries)

SEQ ID NO: 186025 - DNA, 20 bp, synthetic construct
  source 1..20: mol_type = other DNA; note = chemically synthesized
cccatcatccacataatagg

SEQ ID NO: 186026 - skipped

SEQ ID NO: 186027 - DNA, 20 bp, synthetic construct
  source 1..20: mol_type = other DNA; note = chemically synthesized
ccacccatcatccacataat

SEQ ID NO: 186028-186029 - skipped (2 entries)

SEQ ID NO: 186030 - DNA, 20 bp, synthetic construct
  source 1..20: mol_type = other DNA; note = chemically synthesized
ccacctattatgtggatgat

SEQ ID NO: 186031-186064 - skipped (34 entries)

SEQ ID NO: 186065 - DNA, 20 bp, synthetic construct
  source 1..20: mol_type = other DNA; note = chemically synthesized
caactgcagcagcacgcatt

SEQ ID NO: 186066-186082 - skipped (17 entries)

SEQ ID NO: 186083 - DNA, 20 bp, synthetic construct
  source 1..20: mol_type = other DNA; note = chemically synthesized
ccattaaacttgtacctctt

SEQ ID NO: 186084-186134 - skipped (51 entries)

SEQ ID NO: 186135 - DNA, 20 bp, synthetic construct
  source 1..20: mol_type = other DNA; note = chemically synthesized
atatacttgtggctagttag

SEQ ID NO: 186136-186183 - skipped (48 entries)

SEQ ID NO: 186184 - DNA, 20 bp, synthetic construct
  source 1..20: mol_type = other DNA; note = chemically synthesized
aagcctgaatctgcggtggc

SEQ ID NO: 186185 - skipped

SEQ ID NO: 186186 - DNA, 20 bp, synthetic construct
  source 1..20: mol_type = other DNA; note = chemically synthesized
tgggaagcctgaatctgcgg

SEQ ID NO: 186187 - skipped

SEQ ID NO: 186188 - DNA, 20 bp, synthetic construct
  source 1..20: mol_type = other DNA; note = chemically synthesized
cctcctgccaccgcagattc

SEQ ID NO: 186189 - DNA, 20 bp, synthetic construct
  source 1..20: mol_type = other DNA; note = chemically synthesized
aattgggaagcctgaatctg

SEQ ID NO: 186190-186193 - skipped (4 entries)

SEQ ID NO: 186194 - DNA, 20 bp, synthetic construct
  source 1..20: mol_type = other DNA; note = chemically synthesized
aacagatgccagtattctac

SEQ ID NO: 186195-186203 - skipped (9 entries)

SEQ ID NO: 186204 - DNA, 20 bp, synthetic construct
  source 1..20: mol_type = other DNA; note = chemically synthesized
cagaacattgaatgcaactg

SEQ ID NO: 186205 - skipped

SEQ ID NO: 186206 - DNA, 20 bp, synthetic construct
  source 1..20: mol_type = other DNA; note = chemically synthesized
gtcagaacattgaatgcaac

SEQ ID NO: 186207-186208 - skipped (2 entries)

SEQ ID NO: 186209 - DNA, 20 bp, synthetic construct
  source 1..20: mol_type = other DNA; note = chemically synthesized
tccaggatggcattgggcag

SEQ ID NO: 186210-186211 - skipped (2 entries)

SEQ ID NO: 186212 - DNA, 20 bp, synthetic construct
  source 1..20: mol_type = other DNA; note = chemically synthesized
caggaactccaggatggcat

SEQ ID NO: 186213 - DNA, 20 bp, synthetic construct
  source 1..20: mol_type = other DNA; note = chemically synthesized
gccgctgcccaatgccatcc

SEQ ID NO: 186214 - skipped

SEQ ID NO: 186215 - DNA, 20 bp, synthetic construct
  source 1..20: mol_type = other DNA; note = chemically synthesized
atcttacaggaactccagga

SEQ ID NO: 186216 - DNA, 20 bp, synthetic construct
  source 1..20: mol_type = other DNA; note = chemically synthesized
tggtatcttacaggaactcc

SEQ ID NO: 186217 - DNA, 20 bp, synthetic construct
  source 1..20: mol_type = other DNA; note = chemically synthesized
ttggtatcttacaggaactc

SEQ ID NO: 186218 - DNA, 20 bp, synthetic construct
  source 1..20: mol_type = other DNA; note = chemically synthesized
tgccatcctggagttcctgt

SEQ ID NO: 186219 - DNA, 20 bp, synthetic construct
  source 1..20: mol_type = other DNA; note = chemically synthesized
ttgcctttttggtatcttac

SEQ ID NO: 186220 - DNA, 20 bp, synthetic construct
  source 1..20: mol_type = other DNA; note = chemically synthesized
tttgcctttttggtatctta

SEQ ID NO: 186221-186261 - skipped (41 entries)

SEQ ID NO: 186262 - DNA, 20 bp, synthetic construct
  source 1..20: mol_type = other DNA; note = chemically synthesized
aaaactggagctaaccgaga

SEQ ID NO: 186263 - DNA, 20 bp, synthetic construct
  source 1..20: mol_type = other DNA; note = chemically synthesized
aaaaactggagctaaccgag

SEQ ID NO: 186264-186273 - skipped (10 entries)

SEQ ID NO: 186274 - DNA, 20 bp, synthetic construct
  source 1..20: mol_type = other DNA; note = chemically synthesized
tttgtaagcttgtcagctag

SEQ ID NO: 186275-186297 - skipped (23 entries)

SEQ ID NO: 186298 - DNA, 20 bp, synthetic construct
  source 1..20: mol_type = other DNA; note = chemically synthesized
tttgggtttcttagtgatcg

SEQ ID NO: 186299-186300 - skipped (2 entries)

SEQ ID NO: 186301 - DNA, 20 bp, synthetic construct
  source 1..20: mol_type = other DNA; note = chemically synthesized
ttagtgatcgtggatacgag

SEQ ID NO: 186302-186374 - skipped (73 entries)

SEQ ID NO: 186375 - DNA, 20 bp, synthetic construct
  source 1..20: mol_type = other DNA; note = chemically synthesized
cattcagatttaaatacggt

SEQ ID NO: 186376-186669 - skipped (294 entries)

SEQ ID NO: 186670 - DNA, 20 bp, synthetic construct
  source 1..20: mol_type = other DNA; note = chemically synthesized
caggccccaatatacaccga

SEQ ID NO: 186671-186672 - skipped (2 entries)

SEQ ID NO: 186673 - DNA, 20 bp, synthetic construct
  source 1..20: mol_type = other DNA; note = chemically synthesized
gtacagccctcggtgtatat

SEQ ID NO: 186674-186911 - skipped (238 entries)

SEQ ID NO: 186912 - DNA, 20 bp, synthetic construct
  source 1..20: mol_type = other DNA; note = chemically synthesized
aagtgcatatctaactcccg

SEQ ID NO: 186913 - skipped

SEQ ID NO: 186914 - DNA, 20 bp, synthetic construct
  source 1..20: mol_type = other DNA; note = chemically synthesized
agtgcatatctaactcccgt

SEQ ID NO: 186915-189320 - skipped (2406 entries)

SEQ ID NO: 189321 - DNA, 20 bp, synthetic construct
  source 1..20: mol_type = other DNA; note = chemically synthesized
agattcccattattcggtac

SEQ ID NO: 189322-189639 - skipped (318 entries)

SEQ ID NO: 189640 - DNA, 20 bp, synthetic construct
  source 1..20: mol_type = other DNA; note = chemically synthesized
atgtatgacgctcccgagtc

SEQ ID NO: 189641-190492 - skipped (852 entries)

SEQ ID NO: 190493 - DNA, 20 bp, synthetic construct
  source 1..20: mol_type = other DNA; note = chemically synthesized
tcggagtgcctaattcgtgt

SEQ ID NO: 190494-190634 - skipped (141 entries)

SEQ ID NO: 190635 - DNA, 20 bp, synthetic construct
  source 1..20: mol_type = other DNA; note = chemically synthesized
tagtaggttaacactccgtg

SEQ ID NO: 190636-191322 - skipped (687 entries)

SEQ ID NO: 191323 - DNA, 20 bp, synthetic construct
  source 1..20: mol_type = other DNA; note = chemically synthesized
aacgccaactgttagaagcg

SEQ ID NO: 191324 - DNA, 20 bp, synthetic construct
  source 1..20: mol_type = other DNA; note = chemically synthesized
acgccaactgttagaagcgt

SEQ ID NO: 191325-191408 - skipped (84 entries)

SEQ ID NO: 191409 - DNA, 20 bp, synthetic construct
  source 1..20: mol_type = other DNA; note = chemically synthesized
taataaccctacgtatcatc

SEQ ID NO: 191410-191476 - skipped (67 entries)

SEQ ID NO: 191477 - DNA, 20 bp, synthetic construct
  source 1..20: mol_type = other DNA; note = chemically synthesized
cgattaatccggagtgctaa

SEQ ID NO: 191478 - DNA, 20 bp, synthetic construct
  source 1..20: mol_type = other DNA; note = chemically synthesized
gcgattaatccggagtgcta

SEQ ID NO: 191479-191549 - skipped (71 entries)

SEQ ID NO: 191550 - DNA, 20 bp, synthetic construct
  source 1..20: mol_type = other DNA; note = chemically synthesized
tcaactcacttgcggcccta

SEQ ID NO: 191551-191740 - skipped (190 entries)

SEQ ID NO: 191741 - DNA, 20 bp, synthetic construct
  source 1..20: mol_type = other DNA; note = chemically synthesized
aagcacccatgaatcggcca

SEQ ID NO: 191742-191868 - skipped (127 entries)

SEQ ID NO: 191869 - DNA, 20 bp, synthetic construct
  source 1..20: mol_type = other DNA; note = chemically synthesized
tcagccttacgtagcgttgc

SEQ ID NO: 191870-192220 - skipped (351 entries)

SEQ ID NO: 192221 - DNA, 20 bp, synthetic construct
  source 1..20: mol_type = other DNA; note = chemically synthesized
gcatgcctgttaatacgttc

SEQ ID NO: 192222-192744 - skipped (523 entries)

SEQ ID NO: 192745 - DNA, 20 bp, synthetic construct
  source 1..20: mol_type = other DNA; note = chemically synthesized
tcctattctgatcacggacg

SEQ ID NO: 192746-193611 - skipped (866 entries)

SEQ ID NO: 193612 - DNA, 20 bp, synthetic construct
  source 1..20: mol_type = other DNA; note = chemically synthesized
gaaacagcttttggcccgcg

SEQ ID NO: 193613-194291 - skipped (679 entries)

SEQ ID NO: 194292 - DNA, 20 bp, synthetic construct
  source 1..20: mol_type = other DNA; note = chemically synthesized
gcttatacaaccacaccgtt

SEQ ID NO: 194293-194965 - skipped (673 entries)

SEQ ID NO: 194966 - DNA, 20 bp, synthetic construct
  source 1..20: mol_type = other DNA; note = chemically synthesized
ggttgcaggtcctgccgaac

SEQ ID NO: 194967-195574 - skipped (608 entries)

SEQ ID NO: 195575 - DNA, 20 bp, synthetic construct
  source 1..20: mol_type = other DNA; note = chemically synthesized
ttgatttggtcgaggcccaa

SEQ ID NO: 195576-195584 - skipped (9 entries)

SEQ ID NO: 195585 - DNA, 20 bp, synthetic construct
  source 1..20: mol_type = other DNA; note = chemically synthesized
atctactctagttgtaccga

SEQ ID NO: 195586-195760 - skipped (175 entries)

SEQ ID NO: 195761 - DNA, 20 bp, synthetic construct
  source 1..20: mol_type = other DNA; note = chemically synthesized
aaaagcgtcgatcgaactgt

SEQ ID NO: 195762-196501 - skipped (740 entries)

SEQ ID NO: 196502 - DNA, 20 bp, synthetic construct
  source 1..20: mol_type = other DNA; note = chemically synthesized
taccacccgtgttctttgcg

SEQ ID NO: 196503 - DNA, 20 bp, synthetic construct
  source 1..20: mol_type = other DNA; note = chemically synthesized
accacccgtgttctttgcgg

SEQ ID NO: 196504-196797 - skipped (294 entries)

SEQ ID NO: 196798 - DNA, 20 bp, synthetic construct
  source 1..20: mol_type = other DNA; note = chemically synthesized
cactagtagatcacgatcag

SEQ ID NO: 196799-198506 - skipped (1708 entries)

SEQ ID NO: 198507 - DNA, 20 bp, synthetic construct
  source 1..20: mol_type = other DNA; note = chemically synthesized
ctttcccctaccatcgagcg

SEQ ID NO: 198508 - DNA, 20 bp, synthetic construct
  source 1..20: mol_type = other DNA; note = chemically synthesized
gctttcccctaccatcgagc

SEQ ID NO: 198509-198510 - skipped (2 entries)

SEQ ID NO: 198511 - DNA, 20 bp, synthetic construct
  source 1..20: mol_type = other DNA; note = chemically synthesized
gaagaaccccgctcgatggt

SEQ ID NO: 198512 - DNA, 20 bp, synthetic construct
  source 1..20: mol_type = other DNA; note = chemically synthesized
aagaaccccgctcgatggta

SEQ ID NO: 198513 - skipped

SEQ ID NO: 198514 - DNA, 20 bp, synthetic construct
  source 1..20: mol_type = other DNA; note = chemically synthesized
agaaccccgctcgatggtag

SEQ ID NO: 198515-198781 - skipped (267 entries)

SEQ ID NO: 198782 - DNA, 20 bp, synthetic construct
  source 1..20: mol_type = other DNA; note = chemically synthesized
tcttaaaacgcggtcctcct

SEQ ID NO: 198783-199077 - skipped (295 entries)

SEQ ID NO: 199078 - DNA, 20 bp, synthetic construct
  source 1..20: mol_type = other DNA; note = chemically synthesized
acaactgccctctatacggc

SEQ ID NO: 199079-199807 - skipped (729 entries)

SEQ ID NO: 199808 - DNA, 20 bp, synthetic construct
  source 1..20: mol_type = other DNA; note = chemically synthesized
tacattttgggcagtaacgc

SEQ ID NO: 199809-200018 - skipped (210 entries)

SEQ ID NO: 200019 - DNA, 20 bp, synthetic construct
  source 1..20: mol_type = other DNA; note = chemically synthesized
aacgttaggatcgctgattc

SEQ ID NO: 200020-200543 - skipped (524 entries)

SEQ ID NO: 200544 - DNA, 20 bp, synthetic construct
  source 1..20: mol_type = other DNA; note = chemically synthesized
gattatacactaggttcgtc

SEQ ID NO: 200545-202708 - skipped (2164 entries)

SEQ ID NO: 202709 - DNA, 20 bp, synthetic construct
  source 1..20: mol_type = other DNA; note = chemically synthesized
aaatgtaaattccacaacaa

SEQ ID NO: 202710-203516 - skipped (807 entries)

SEQ ID NO: 203517 - DNA, 20 bp, synthetic construct
  source 1..20: mol_type = other DNA; note = chemically synthesized
ggccctttaattacgcactg

SEQ ID NO: 203518-205318 - skipped (1801 entries)

SEQ ID NO: 205319 - DNA, 20 bp, synthetic construct
  source 1..20: mol_type = other DNA; note = chemically synthesized
gctaagaaaccaatgtacgg

SEQ ID NO: 205320-205627 - skipped (308 entries)

SEQ ID NO: 205628 - DNA, 20 bp, synthetic construct
  source 1..20: mol_type = other DNA; note = chemically synthesized
caacgagtatacaaagatcg

SEQ ID NO: 205629-208852 - skipped (3224 entries)

SEQ ID NO: 208853 - DNA, 20 bp, synthetic construct
  source 1..20: mol_type = other DNA; note = chemically synthesized
cgtgcaattttgggcgcact

SEQ ID NO: 208854 - DNA, 20 bp, synthetic construct
  source 1..20: mol_type = other DNA; note = chemically synthesized
acgtgcaattttgggcgcac

SEQ ID NO: 208855-210513 - skipped (1659 entries)

SEQ ID NO: 210514 - DNA, 20 bp, synthetic construct
  source 1..20: mol_type = other DNA; note = chemically synthesized
tgatacatcgtgttgtgcgt

SEQ ID NO: 210515 - skipped

SEQ ID NO: 210516 - DNA, 20 bp, synthetic construct
  source 1..20: mol_type = other DNA; note = chemically synthesized
cggactagcgggtcaatatc

SEQ ID NO: 210517-211527 - skipped (1011 entries)

SEQ ID NO: 211528 - DNA, 20 bp, synthetic construct
  source 1..20: mol_type = other DNA; note = chemically synthesized
aaaccagcggattacggtgt

SEQ ID NO: 211529 - DNA, 20 bp, synthetic construct
  source 1..20: mol_type = other DNA; note = chemically synthesized
taaaccagcggattacggtg

SEQ ID NO: 211530 - skipped

SEQ ID NO: 211531 - DNA, 20 bp, synthetic construct
  source 1..20: mol_type = other DNA; note = chemically synthesized
tcacccacaccgtaatccgc

SEQ ID NO: 211532-212989 - skipped (1458 entries)

SEQ ID NO: 212990 - DNA, 20 bp, synthetic construct
  source 1..20: mol_type = other DNA; note = chemically synthesized
atcatgtttagttatgcccg

SEQ ID NO: 212991-213419 - skipped (429 entries)

SEQ ID NO: 213420 - DNA, 20 bp, synthetic construct
  source 1..20: mol_type = other DNA; note = chemically synthesized
aagctaagtgaggttcgacc

SEQ ID NO: 213421-213616 - skipped (196 entries)

SEQ ID NO: 213617 - DNA, 20 bp, synthetic construct
  source 1..20: mol_type = other DNA; note = chemically synthesized
ttcaagtgctaacgcgtgtg

SEQ ID NO: 213618 - DNA, 20 bp, synthetic construct
  source 1..20: mol_type = other DNA; note = chemically synthesized
attcaagtgctaacgcgtgt

SEQ ID NO: 213619 - skipped

SEQ ID NO: 213620 - DNA, 20 bp, synthetic construct
  source 1..20: mol_type = other DNA; note = chemically synthesized
tattcaagtgctaacgcgtg

SEQ ID NO: 213621-213659 - skipped (39 entries)

SEQ ID NO: 213660 - DNA, 20 bp, synthetic construct
  source 1..20: mol_type = other DNA; note = chemically synthesized
tttaggaatcgattgtttcg

SEQ ID NO: 213661-215618 - skipped (1958 entries)

SEQ ID NO: 215619 - DNA, 20 bp, synthetic construct
  source 1..20: mol_type = other DNA; note = chemically synthesized
tcttcccatgaacgaaatcg

SEQ ID NO: 215620-216164 - skipped (545 entries)

SEQ ID NO: 216165 - DNA, 20 bp, synthetic construct
  source 1..20: mol_type = other DNA; note = chemically synthesized
tctgatgtggactagtaacg

SEQ ID NO: 216166-217081 - skipped (916 entries)

SEQ ID NO: 217082 - DNA, 20 bp, synthetic construct
  source 1..20: mol_type = other DNA; note = chemically synthesized
taggagcctagttatacgaa

SEQ ID NO: 217083-217089 - skipped (7 entries)

SEQ ID NO: 217090 - DNA, 20 bp, synthetic construct
  source 1..20: mol_type = other DNA; note = chemically synthesized
gattagcatacaaccgcact

SEQ ID NO: 217091-217321 - skipped (231 entries)

SEQ ID NO: 217322 - DNA, 20 bp, synthetic construct
  source 1..20: mol_type = other DNA; note = chemically synthesized
gattctgacgtgagtactac

SEQ ID NO: 217323-217733 - skipped (411 entries)

SEQ ID NO: 217734 - DNA, 20 bp, synthetic construct
  source 1..20: mol_type = other DNA; note = chemically synthesized
cactgctttagctacgctat

SEQ ID NO: 217735-218172 - skipped (438 entries)

SEQ ID NO: 218173 - DNA, 20 bp, synthetic construct
  source 1..20: mol_type = other DNA; note = chemically synthesized
actctagcttcggacaacgt

SEQ ID NO: 218174-218206 - skipped (33 entries)

SEQ ID NO: 218207 - DNA, 20 bp, synthetic construct
  source 1..20: mol_type = other DNA; note = chemically synthesized
acgtaaccctagtttcgctc

SEQ ID NO: 218208-218292 - skipped (85 entries)

SEQ ID NO: 218293 - DNA, 20 bp, synthetic construct
  source 1..20: mol_type = other DNA; note = chemically synthesized
cccgtcttaccggtcttgat

SEQ ID NO: 218294-218296 - skipped (3 entries)

SEQ ID NO: 218297 - DNA, 20 bp, synthetic construct
  source 1..20: mol_type = other DNA; note = chemically synthesized
ccgatcaagaccggtaagac

SEQ ID NO: 218298-219973 - skipped (1676 entries)

SEQ ID NO: 219974 - DNA, 20 bp, synthetic construct
  source 1..20: mol_type = other DNA; note = chemically synthesized
aataatacgtggacctgcgc

SEQ ID NO: 219975-221142 - skipped (1168 entries)

SEQ ID NO: 221143 - DNA, 20 bp, synthetic construct
  source 1..20: mol_type = other DNA; note = chemically synthesized
gacgagttggctcgggatta

SEQ ID NO: 221144-221913 - skipped (770 entries)

SEQ ID NO: 221914 - DNA, 20 bp, synthetic construct
  source 1..20: mol_type = other DNA; note = chemically synthesized
ccccgtgtgtagcagcgcaa

SEQ ID NO: 221915-223417 - skipped (1503 entries)

SEQ ID NO: 223418 - DNA, 20 bp, synthetic construct
  source 1..20: mol_type = other DNA; note = chemically synthesized
ggttttctcgtgacgagcca

SEQ ID NO: 223419-224125 - skipped (707 entries)

SEQ ID NO: 224126 - DNA, 20 bp, synthetic construct
  source 1..20: mol_type = other DNA; note = chemically synthesized
gtccaacactatgatccgat

SEQ ID NO: 224127 - DNA, 20 bp, synthetic construct
  source 1..20: mol_type = other DNA; note = chemically synthesized
tgtccaacactatgatccga

SEQ ID NO: 224128-224377 - skipped (250 entries)

SEQ ID NO: 224378 - DNA, 20 bp, synthetic construct
  source 1..20: mol_type = other DNA; note = chemically synthesized
gattaatgaacgtgcgcacc

SEQ ID NO: 224379-224548 - skipped (170 entries)

SEQ ID NO: 224549 - DNA, 20 bp, synthetic construct
  source 1..20: mol_type = other DNA; note = chemically synthesized
ggcgccaagattcccctagc

SEQ ID NO: 224550-224649 - skipped (100 entries)

SEQ ID NO: 224650 - DNA, 20 bp, synthetic construct
  source 1..20: mol_type = other DNA; note = chemically synthesized
atgctgaggtccggattaag

SEQ ID NO: 224651-225046 - skipped (396 entries)

SEQ ID NO: 225047 - DNA, 20 bp, synthetic construct
  source 1..20: mol_type = other DNA; note = chemically synthesized
tccgccaagcgcctatttac

SEQ ID NO: 225048-225409 - skipped (362 entries)

SEQ ID NO: 225410 - DNA, 20 bp, synthetic construct
  source 1..20: mol_type = other DNA; note = chemically synthesized
agcatctagtaattgacggt

SEQ ID NO: 225411-225416 - skipped (6 entries)

SEQ ID NO: 225417 - DNA, 20 bp, synthetic construct
  source 1..20: mol_type = other DNA; note = chemically synthesized
actagatgcttgtctacggc

SEQ ID NO: 225418-226061 - skipped (644 entries)

SEQ ID NO: 226062 - DNA, 20 bp, synthetic construct
  source 1..20: mol_type = other DNA; note = chemically synthesized
ggggagcttatacaagaccg

SEQ ID NO: 226063 - DNA, 20 bp, synthetic construct
  source 1..20: mol_type = other DNA; note = chemically synthesized
gggagcttatacaagaccgt

SEQ ID NO: 226064-227601 - skipped (1538 entries)

SEQ ID NO: 227602 - DNA, 20 bp, synthetic construct
  source 1..20: mol_type = other DNA; note = chemically synthesized
cagggacgttgttagaccgt

SEQ ID NO: 227603-228447 - skipped (845 entries)

SEQ ID NO: 228448 - DNA, 20 bp, synthetic construct
  source 1..20: mol_type = other DNA; note = chemically synthesized
cctatcactagtattcggta

SEQ ID NO: 228449-228977 - skipped (529 entries)

SEQ ID NO: 228978 - DNA, 20 bp, synthetic construct
  source 1..20: mol_type = other DNA; note = chemically synthesized
atgggctagttacggcttga

SEQ ID NO: 228979-229302 - skipped (324 entries)

SEQ ID NO: 229303 - DNA, 20 bp, synthetic construct
  source 1..20: mol_type = other DNA; note = chemically synthesized
acactcaggcattactacgg

SEQ ID NO: 229304-229556 - skipped (253 entries)

SEQ ID NO: 229557 - DNA, 20 bp, synthetic construct
  source 1..20: mol_type = other DNA; note = chemically synthesized
acaggagacgtaattgacgg

SEQ ID NO: 229558 - DNA, 20 bp, synthetic construct
  source 1..20: mol_type = other DNA; note = chemically synthesized
tacaggagacgtaattgacg

SEQ ID NO: 229559-230004 - skipped (446 entries)

SEQ ID NO: 230005 - DNA, 20 bp, synthetic construct
  source 1..20: mol_type = other DNA; note = chemically synthesized
tgttctgtagatgtagcgcc

SEQ ID NO: 230006-232400 - skipped (2395 entries)

SEQ ID NO: 232401 - DNA, 20 bp, synthetic construct
  source 1..20: mol_type = other DNA; note = chemically synthesized
acctagatgacacagcgtcg

SEQ ID NO: 232402-236083 - skipped (3682 entries)

SEQ ID NO: 236084 - DNA, 20 bp, synthetic construct
  source 1..20: mol_type = other DNA; note = chemically synthesized
atcaatttttctacgtaccg

SEQ ID NO: 236085-236162 - skipped (78 entries)

SEQ ID NO: 236163 - DNA, 20 bp, synthetic construct
  source 1..20: mol_type = other DNA; note = chemically synthesized
aaggtagaaacaagcattct

SEQ ID NO: 236164-236914 - skipped (751 entries)

SEQ ID NO: 236915 - DNA, 20 bp, synthetic construct
  source 1..20: mol_type = other DNA; note = chemically synthesized
atcgatgaaggtatcttacg

SEQ ID NO: 236916-237392 - skipped (477 entries)

SEQ ID NO: 237393 - DNA, 20 bp, synthetic construct
  source 1..20: mol_type = other DNA; note = chemically synthesized
ctctatacaaatgccaacgc

SEQ ID NO: 237394 - DNA, 20 bp, synthetic construct
  source 1..20: mol_type = other DNA; note = chemically synthesized
acttgcatgcacaccagcgt

SEQ ID NO: 237395-237520 - skipped (126 entries)

SEQ ID NO: 237521 - DNA, 20 bp, synthetic construct
  source 1..20: mol_type = other DNA; note = chemically synthesized
agggaagcatcgtaacagca

SEQ ID NO: 237522-237532 - skipped (11 entries)

SEQ ID NO: 237533 - DNA, 20 bp, synthetic construct
  source 1..20: mol_type = other DNA; note = chemically synthesized
agagtttgcctggacggagc

SEQ ID NO: 237534 - skipped

SEQ ID NO: 237535 - DNA, 20 bp, synthetic construct
  source 1..20: mol_type = other DNA; note = chemically synthesized
cagataaaccagctccgtcc

SEQ ID NO: 237536-237545 - skipped (10 entries)

SEQ ID NO: 237546 - DNA, 20 bp, synthetic construct
  source 1..20: mol_type = other DNA; note = chemically synthesized
aatattagagcacggtgcta

SEQ ID NO: 237547-237598 - skipped (52 entries)

SEQ ID NO: 237599 - DNA, 20 bp, synthetic construct
  source 1..20: mol_type = other DNA; note = chemically synthesized
cagatctgtcaaatcgcctg

SEQ ID NO: 237600 - DNA, 20 bp, synthetic construct
  source 1..20: mol_type = other DNA; note = chemically synthesized
agatctgtcaaatcgcctgc

SEQ ID NO: 237601 - DNA, 20 bp, synthetic construct
  source 1..20: mol_type = other DNA; note = chemically synthesized
atccatatgcttttacctgc

SEQ ID NO: 237602 - DNA, 20 bp, synthetic construct
  source 1..20: mol_type = other DNA; note = chemically synthesized
gtcaaatcgcctgcaggtaa

SEQ ID NO: 237603 - DNA, 20 bp, synthetic construct
  source 1..20: mol_type = other DNA; note = chemically synthesized
gatccatatgcttttacctg

SEQ ID NO: 237604-237660 - skipped (57 entries)

SEQ ID NO: 237661 - DNA, 20 bp, synthetic construct
  source 1..20: mol_type = other DNA; note = chemically synthesized
actcctttcagttgatgaac

SEQ ID NO: 237662-237663 - skipped (2 entries)

SEQ ID NO: 237664 - DNA, 20 bp, synthetic construct
  source 1..20: mol_type = other DNA; note = chemically synthesized
ctgcctgttcatcaactgaa

SEQ ID NO: 237665-237709 - skipped (45 entries)

SEQ ID NO: 237710 - DNA, 20 bp, synthetic construct
  source 1..20: mol_type = other DNA; note = chemically synthesized
catcgcatagtttagtatat

SEQ ID NO: 237711-237723 - skipped (13 entries)

SEQ ID NO: 237724 - DNA, 20 bp, synthetic construct
  source 1..20: mol_type = other DNA; note = chemically synthesized
attttagattggaatactgc

SEQ ID NO: 237725-237739 - skipped (15 entries)

SEQ ID NO: 237740 - DNA, 20 bp, synthetic construct
  source 1..20: mol_type = other DNA; note = chemically synthesized
gcctcagtctcttttatgac

SEQ ID NO: 237741-237748 - skipped (8 entries)

SEQ ID NO: 237749 - DNA, 20 bp, synthetic construct
  source 1..20: mol_type = other DNA; note = chemically synthesized
cttaggtaaacatacagccc

SEQ ID NO: 237750-252290 - skipped (14541 entries)

SEQ ID NO: 252291 - DNA, 20 bp, synthetic construct
  source 1..20: mol_type = other DNA; note = chemically synthesized
ttttatattacagaatataa

SEQ ID NO: 252292 - DNA, 20 bp, synthetic construct
  source 1..20: mol_type = other DNA; note = chemically synthesized
gttttaaaatttttatatta

SEQ ID NO: 252293-481419 - skipped (229127 entries)

SEQ ID NO: 481420 - DNA, 20 bp, synthetic construct
  source 1..20: mol_type = other DNA; note = chemically synthesized
aacatttggtcctttgcagg

SEQ ID NO: 481421 - DNA, 20 bp, synthetic construct
  source 1..20: mol_type = other DNA; note = chemically synthesized
tctgaacatttggtcctttg

SEQ ID NO: 481422-482859 - skipped (1438 entries)

SEQ ID NO: 482860 - DNA, 20 bp, synthetic construct
  source 1..20: mol_type = other DNA; note = chemically synthesized
tgattctgaattctttcaac

SEQ ID NO: 482861 - DNA, 20 bp, synthetic construct
  source 1..20: mol_type = other DNA; note = chemically synthesized
tttccttttattctagttga

SEQ ID NO: 482862-485511 - skipped (2650 entries)

SEQ ID NO: 485512 - DNA, 20 bp, synthetic construct
  source 1..20: mol_type = other DNA; note = chemically synthesized
tgagtaggagctaaaatatt

SEQ ID NO: 485513-489813 - skipped (4301 entries)

SEQ ID NO: 489814 - DNA, 20 bp, synthetic construct
  source 1..20: mol_type = other DNA; note = chemically synthesized
ttcttctagcctggagaaag

SEQ ID NO: 489815-490806 - skipped (992 entries)

SEQ ID NO: 490807 - DNA, 20 bp, synthetic construct
  source 1..20: mol_type = other DNA; note = chemically synthesized
ttggtatcttacaggaactc

SEQ ID NO: 490808-499466 - skipped (8659 entries)

SEQ ID NO: 499467 - DNA, 20 bp, synthetic construct
  source 1..20: mol_type = other DNA; note = chemically synthesized
gttttaaaatttttatatta

SEQ ID NO: 499468-534493 - skipped (35026 entries)

SEQ ID NO: 534494 - DNA, 20 bp, synthetic construct
  source 1..20: mol_type = other DNA; note = chemically synthesized
ctgattctgaattctttcaa

SEQ ID NO: 534495 - DNA, 20 bp, synthetic construct
  source 1..20: mol_type = other DNA; note = chemically synthesized
ttttccttttattctagttg

SEQ ID NO: 534496-536096 - skipped (1601 entries)

SEQ ID NO: 536097 - DNA, 20 bp, synthetic construct
  source 1..20: mol_type = other DNA; note = chemically synthesized
atcttctaacttcctcttta

SEQ ID NO: 536098-537306 - skipped (1209 entries)

SEQ ID NO: 537307 - DNA, 20 bp, synthetic construct
  source 1..20: mol_type = other DNA; note = chemically synthesized
ttcttttgttcttctagcct

SEQ ID NO: 537308 - DNA, 20 bp, synthetic construct
  source 1..20: mol_type = other DNA; note = chemically synthesized
gttcttctagcctggagaaa

SEQ ID NO: 537309-541321 - skipped (4013 entries)

SEQ ID NO: 541322 - DNA, 20 bp, synthetic construct
  source 1..20: mol_type = other DNA; note = chemically synthesized
tgttttaaaatttttatatt

SEQ ID NO: 541323-1410399 - skipped (869077 entries)

SEQ ID NO: 1410400 - DNA, 24 bp, synthetic construct
  source 1..24: mol_type = other DNA; note = chemically synthesized
agtctgagtaggagctaaaatatt

SEQ ID NO: 1410401 - DNA, 24 bp, synthetic construct
  source 1..24: mol_type = other DNA; note = chemically synthesized
cttgatccatatgcttttacctgc

SEQ ID NO: 1410402 - DNA, 24 bp, synthetic construct
  source 1..24: mol_type = other DNA; note = chemically synthesized
atatttgttcttacaggcaacaat

SEQ ID NO: 1410403 - DNA, 23 bp, synthetic construct
  source 1..23: mol_type = other DNA; note = chemically synthesized
tgcaaaaacccaaaatattttag

SEQ ID NO: 1410404 - DNA, 23 bp, synthetic construct
  source 1..23: mol_type = other DNA; note = chemically synthesized
gcaaaaacccaaaatattttagc

SEQ ID NO: 1410405 - DNA, 23 bp, synthetic construct
  source 1..23: mol_type = other DNA; note = chemically synthesized
caaaaacccaaaatattttagct

SEQ ID NO: 1410406 - DNA, 23 bp, synthetic construct
  source 1..23: mol_type = other DNA; note = chemically synthesized
ccgctgcccaatgccatcctgga

SEQ ID NO: 1410407 - DNA, 23 bp, synthetic construct
  source 1..23: mol_type = other DNA; note = chemically synthesized
tgttttgcctttttggtatctta

SEQ ID NO: 1410408 - DNA, 23 bp, synthetic construct
  source 1..23: mol_type = other DNA; note = chemically synthesized
gttttgcctttttggtatcttac

SEQ ID NO: 1410409 - DNA, 23 bp, synthetic construct
  source 1..23: mol_type = other DNA; note = chemically synthesized
ttttgcctttttggtatcttaca

SEQ ID NO: 1410410 - DNA, 23 bp, synthetic construct
  source 1..23: mol_type = other DNA; note = chemically synthesized
gcctttttggtatcttacaggaa

SEQ ID NO: 1410411 - DNA, 23 bp, synthetic construct
  source 1..23: mol_type = other DNA; note = chemically synthesized
cctttttggtatcttacaggaac

SEQ ID NO: 1410412 - DNA, 23 bp, synthetic construct
  source 1..23: mol_type = other DNA; note = chemically synthesized
tggtatcttacaggaactccagg

SEQ ID NO: 1410413 - DNA, 23 bp, synthetic construct
  source 1..23: mol_type = other DNA; note = chemically synthesized
tttttccttttattctagttgaa

SEQ ID NO: 1410414 - DNA, 23 bp, synthetic construct
  source 1..23: mol_type = other DNA; note = chemically synthesized
tccttttattctagttgaaagaa

SEQ ID NO: 1410415 - DNA, 23 bp, synthetic construct
  source 1..23: mol_type = other DNA; note = chemically synthesized
ccttttattctagttgaaagaat

SEQ ID NO: 1410416 - DNA, 23 bp, synthetic construct
  source 1..23: mol_type = other DNA; note = chemically synthesized
tcaacagatctgtcaaatcgcct

SEQ ID NO: 1410417 - DNA, 23 bp, synthetic construct
  source 1..23: mol_type = other DNA; note = chemically synthesized
tcttgatccatatgcttttacct

SEQ ID NO: 1410418 - DNA, 23 bp, synthetic construct
  source 1..23: mol_type = other DNA; note = chemically synthesized
cttgatccatatgcttttacctg

SEQ ID NO: 1410419 - DNA, 23 bp, synthetic construct
  source 1..23: mol_type = other DNA; note = chemically synthesized
ttgatccatatgcttttacctgc

SEQ ID NO: 1410420 - DNA, 23 bp, synthetic construct
  source 1..23: mol_type = other DNA; note = chemically synthesized
gttcttctagcctggagaaagaa

SEQ ID NO: 1410421 - DNA, 23 bp, synthetic construct
  source 1..23: mol_type = other DNA; note = chemically synthesized
ttcttctagcctggagaaagaag

SEQ ID NO: 1410422 - DNA, 23 bp, synthetic construct
  source 1..23: mol_type = other DNA; note = chemically synthesized
attcttctttctccaggctagaa

SEQ ID NO: 1410423 - DNA, 23 bp, synthetic construct
  source 1..23: mol_type = other DNA; note = chemically synthesized
ttcttctttctccaggctagaag

SEQ ID NO: 1410424 - DNA, 23 bp, synthetic construct
  source 1..23: mol_type = other DNA; note = chemically synthesized
ttgtagactatcttttatattct

SEQ ID NO: 1410425 - DNA, 23 bp, synthetic construct
  source 1..23: mol_type = other DNA; note = chemically synthesized
tactgttttaaaatttttatatt

SEQ ID NO: 1410426 - DNA, 23 bp, synthetic construct
  source 1..23: mol_type = other DNA; note = chemically synthesized
actgttttaaaatttttatatta

SEQ ID NO: 1410427 - DNA, 23 bp, synthetic construct
  source 1..23: mol_type = other DNA; note = chemically synthesized
ctgttttaaaatttttatattac

SEQ ID NO: 1410428 - DNA, 23 bp, synthetic construct
  source 1..23: mol_type = other DNA; note = chemically synthesized
aaaatttttatattacagaatat

SEQ ID NO: 1410429 - DNA, 23 bp, synthetic construct
  source 1..23: mol_type = other DNA; note = chemically synthesized
aaatttttatattacagaatata

SEQ ID NO: 1410430 - DNA, 19 bp, synthetic construct
  source 1..19: mol_type = other DNA; note = chemically synthesized
cctactcagactgttactc

SEQ ID NO: 1410431 - DNA, 19 bp, synthetic construct
  source 1..19: mol_type = other DNA; note = chemically synthesized
actctggtgacacaacctg

SEQ ID NO: 1410432 - DNA, 19 bp, synthetic construct
  source 1..19: mol_type = other DNA; note = chemically synthesized
acacaacctgtggttacta

SEQ ID NO: 1410433 - DNA, 19 bp, synthetic construct
  source 1..19: mol_type = other DNA; note = chemically synthesized
atgttggaggtacctgctc

SEQ ID NO: 1410434 - DNA, 19 bp, synthetic construct
  source 1..19: mol_type = other DNA; note = chemically synthesized
tgctctggcagatttcaac

SEQ ID NO: 1410435 - DNA, 19 bp, synthetic construct
  source 1..19: mol_type = other DNA; note = chemically synthesized
gctctggcagatttcaacc

SEQ ID NO: 1410436 - DNA, 19 bp, synthetic construct
  source 1..19: mol_type = other DNA; note = chemically synthesized
ggcagatttcaaccgggct

SEQ ID NO: 1410437 - DNA, 19 bp, synthetic construct
  source 1..19: mol_type = other DNA; note = chemically synthesized
ttggacagaacttaccgac

SEQ ID NO: 1410438 - DNA, 19 bp, synthetic construct
  source 1..19: mol_type = other DNA; note = chemically synthesized
catctcgttgatatcctca

SEQ ID NO: 1410439 - DNA, 19 bp, synthetic construct
  source 1..19: mol_type = other DNA; note = chemically synthesized
ggtaagttctgtccaagcc

SEQ ID NO: 1410440 - DNA, 19 bp, synthetic construct
  source 1..19: mol_type = other DNA; note = chemically synthesized
ggttgaaatctgccagagc

SEQ ID NO: 1410441 - DNA, 19 bp, synthetic construct
  source 1..19: mol_type = other DNA; note = chemically synthesized
gcaggtacctccaacatca

SEQ ID NO: 1410442 - DNA, 19 bp, synthetic construct
  source 1..19: mol_type = other DNA; note = chemically synthesized
ggcatttctagtttggaga

SEQ ID NO: 1410443 - DNA, 19 bp, synthetic construct
  source 1..19: mol_type = other DNA; note = chemically synthesized
cagtttccttagtaaccac

SEQ ID NO: 1410444 - DNA, 19 bp, synthetic construct
  source 1..19: mol_type = other DNA; note = chemically synthesized
ccagagtaacagtctgagt

SEQ ID NO: 1410445 - DNA, 19 bp, synthetic construct
  source 1..19: mol_type = other DNA; note = chemically synthesized
ggtatcttacaggaactcc

SEQ ID NO: 1410446 - DNA, 19 bp, synthetic construct
  source 1..19: mol_type = other DNA; note = chemically synthesized
tcttacaggaactccagga

SEQ ID NO: 1410447 - DNA, 19 bp, synthetic construct
  source 1..19: mol_type = other DNA; note = chemically synthesized
aggaactccaggatggcat

SEQ ID NO: 1410448 - DNA, 19 bp, synthetic construct
  source 1..19: mol_type = other DNA; note = chemically synthesized
ggaactccaggatggcatt

SEQ ID NO: 1410449 - DNA, 19 bp, synthetic construct
  source 1..19: mol_type = other DNA; note = chemically synthesized
ccaggatggcattgggcag

SEQ ID NO: 1410450 - DNA, 19 bp, synthetic construct
  source 1..19: mol_type = other DNA; note = chemically synthesized
tcagaacattgaatgcaac

SEQ ID NO: 1410451 - DNA, 19 bp, synthetic construct
  source 1..19: mol_type = other DNA; note = chemically synthesized
agaacattgaatgcaactg

SEQ ID NO: 1410452 - DNA, 19 bp, synthetic construct
  source 1..19: mol_type = other DNA; note = chemically synthesized
acagatgccagtattctac

SEQ ID NO: 1410453 - DNA, 19 bp, synthetic construct
  source 1..19: mol_type = other DNA; note = chemically synthesized
attgggaagcctgaatctg

SEQ ID NO: 1410454 - DNA, 19 bp, synthetic construct
  source 1..19: mol_type = other DNA; note = chemically synthesized
gggaagcctgaatctgcgg

SEQ ID NO: 1410455 - DNA, 19 bp, synthetic construct
  source 1..19: mol_type = other DNA; note = chemically synthesized
agcctgaatctgcggtggc

SEQ ID NO: 1410456 - DNA, 19 bp, synthetic construct
  source 1..19: mol_type = other DNA; note = chemically synthesized
ctcctgccaccgcagattc

SEQ ID NO: 1410457 - DNA, 19 bp, synthetic construct
  source 1..19: mol_type = other DNA; note = chemically synthesized
ccgctgcccaatgccatcc

SEQ ID NO: 1410458 - DNA, 19 bp, synthetic construct
  source 1..19: mol_type = other DNA; note = chemically synthesized
acaagaacaccttcagaac

SEQ ID NO: 1410459 - DNA, 19 bp, synthetic construct
  source 1..19: mol_type = other DNA; note = chemically synthesized
agaacaccttcagaaccgg

SEQ ID NO: 1410460 - DNA, 19 bp, synthetic construct
  source 1..19: mol_type = other DNA; note = chemically synthesized
gttaaaggattcaacacaa

SEQ ID NO: 1410461 - DNA, 19 bp, synthetic construct
  source 1..19: mol_type = other DNA; note = chemically synthesized
acacaatggctggaagcta

SEQ ID NO: 1410462 - DNA, 19 bp, synthetic construct
  source 1..19: mol_type = other DNA; note = chemically synthesized
gctgagcaggtcttaggac

SEQ ID NO: 1410463 - DNA, 19 bp, synthetic construct
  source 1..19: mol_type = other DNA; note = chemically synthesized
cagagccaagcttgagtca

SEQ ID NO: 1410464 - DNA, 19 bp, synthetic construct
  source 1..19: mol_type = other DNA; note = chemically synthesized
gccaagcttgagtcatgga

SEQ ID NO: 1410465 - DNA, 19 bp, synthetic construct
  source 1..19: mol_type = other DNA; note = chemically synthesized
acaagaacaccttcagaac

SEQ ID NO: 1410466 - DNA, 19 bp, synthetic construct
  source 1..19: mol_type = other DNA; note = chemically synthesized
agaacaccttcagaaccgg

SEQ ID NO: 1410467 - DNA, 19 bp, synthetic construct
  source 1..19: mol_type = other DNA; note = chemically synthesized
gttaaaggattcaacacaa

SEQ ID NO: 1410468 - DNA, 19 bp, synthetic construct
  source 1..19: mol_type = other DNA; note = chemically synthesized
acacaatggctggaagcta

SEQ ID NO: 1410469 - DNA, 19 bp, synthetic construct
  source 1..19: mol_type = other DNA; note = chemically synthesized
aagaagctgagcaggtctt

SEQ ID NO: 1410470 - DNA, 19 bp, synthetic construct
  source 1..19: mol_type = other DNA; note = chemically synthesized
gctgagcaggtcttaggac

SEQ ID NO: 1410471 - DNA, 19 bp, synthetic construct
  source 1..19: mol_type = other DNA; note = chemically synthesized
cagagccaagcttgagtca

SEQ ID NO: 1410472 - DNA, 19 bp, synthetic construct
  source 1..19: mol_type = other DNA; note = chemically synthesized
gccaagcttgagtcatgga

SEQ ID NO: 1410473 - skipped

SEQ ID NO: 1410474 - protein, 9 aa, synthetic construct
  source 1..9: note = chemically synthesized
LAGLIDADG

SEQ ID NO: 1410475 - DNA, 20 bp, synthetic construct
  source 1..20: mol_type = other DNA; note = chemically synthesized
ggggctccaccctcacgagt

SEQ ID NO: 1410476 - DNA, 64 bp, synthetic construct
  source 1..64: mol_type = other DNA
tactcaaggcattcagacagtggtttaagtaatgtagggtgggcaggaactttggtaagaccca

SEQ ID NO: 1410477 - DNA, 64 bp, synthetic construct
  source 1..64: mol_type = other DNA
tgggtcttaccaaagttcctgcccaccctacattacttaaaccactgtctgaatgccttgagta

SEQ ID NO: 1410478 - DNA, 59 bp, synthetic construct
  source 1..59: mol_type = other DNA
tactcaaggcattcagacagtggtttaagtagggtgggcaggaactttggtaagaccca

SEQ ID NO: 1410479 - DNA, 48 bp, synthetic construct
  source 1..48: mol_type = other DNA
tactcaaggcattcagacagtggtgggcaggaactttggtaagaccca

SEQ ID NO: 1410480 - DNA, 88 bp, synthetic construct
  source 1..88: mol_type = other DNA
cagtggtttaagtaatccgagggtagggtgggcaggaactttggtaagacccatctgactagacgctgtgcatattcttttcttctga

SEQ ID NO: 1410481 - DNA, 88 bp, synthetic construct
  source 1..88: mol_type = other DNA
tcagaagaaaagaatatgcacagcgtctagtcagatgggtcttaccaaagttcctgcccaccctaccctcggattacttaaaccactg

SEQ ID NO: 1410482 - DNA, 87 bp, synthetic construct
  source 1..87: mol_type = other DNA
cagtggtttaagtaatccgaggtagggtgggcaggaactttggtaagacccatctgactagacgctgtgcatattcttttcttctga

SEQ ID NO: 1410483 - DNA, 74 bp, synthetic construct
  source 1..74: mol_type = other DNA
cagtggtttaagtaatccgaggaactttggtaagacccatctgactagacgctgtgcatattcttttcttctga

SEQ ID NO: 1410484 - DNA, 78 bp, synthetic construct
  source 1..78: mol_type = other DNA
cagtggtttaagtaatccgaggcaggaactttggtaagacccatctgactagacgctgtgcatattcttttcttctga

SEQ ID NO: 1410485 - DNA, 89 bp, synthetic construct
  source 1..89: mol_type = other DNA
cagtggtttaagtaatccgaggagtagggtgggcaggaactttggtaagacccatctgactagacgctgtgcatattcttttcttctga

SEQ ID NO: 1410486 - DNA, 28 bp, synthetic construct
  source 1..28: mol_type = other DNA
cagtggtttaagtattcttttcttctga

SEQ ID NO: 1410487 - DNA, 96 bp, synthetic construct
  source 1..96: mol_type = other DNA
agaaagatcaaaagggggctgaactcccacttttataagggaaccaaacccacttaggggataaagaaggcctatttcatagagttggtgtaaagg

SEQ ID NO: 1410488 - DNA, 96 bp, synthetic construct
  source 1..96: mol_type = other DNA
cctttacaccaactctatgaaataggccttctttatcccctaagtgggtttggttcccttataaaagtgggagttcagcccccttttgatctttct

SEQ ID NO: 1410489 - DNA, 142 bp, synthetic construct
  source 1..142: mol_type = other DNA
agaaagatcaaaagggggctgaactcccacttttataagggaaccaaacccttataaagtgataaagtgggagttctttatcccctttattccccttatataggggataaagaaggcctatttcatagagttggtgtaaagg

SEQ ID NO: 1410490 - DNA, 95 bp, synthetic construct
  source 1..95: mol_type = other DNA
agaaagatcaaaagggggctgaactcccacttttataagggaaccaaacccacttagggataaagaaggcctatttcatagagttggtgtaaagg

1. (canceled)

2. (canceled)

3. An ex vivo method for treating a patient with Duchenne Muscular Dystrophy (DMD), the method comprising the steps of:
i) creating a DMD patient specific induced pluripotent stem cell (iPSC);
ii) editing within or near a dystrophin gene of the iPSC;
iii) differentiating the genome-edited iPSC into a Pax7+ muscle progenitor cell; and
iv) implanting the Pax7+ muscle progenitor cell into the patient.

4. The method of claim 3, wherein the creating step comprises:
a) isolating a somatic cell from the patient; and
b) introducing a set of pluripotency-associated genes into the somatic cell to induce the somatic cell to become a pluripotent stem cell.

5. The method of claim 4, wherein the somatic cell is a fibroblast.

6. The method of claim 4, wherein the set of pluripotency-associated genes is one or more of the genes selected from the group consisting of OCT4, SOX2, KLF4, Lin28, NANOG and cMYC.

7. The method of claim 3, wherein the editing step comprises introducing into the iPSC one or more deoxyribonucleic acid (DNA) endonucleases to effect one or more single-strand breaks (SSBs) or double-strand breaks (DSBs) within or near the dystrophin gene that results in a permanent deletion, insertion, or replacement of one or more exons or aberrant intronic splice acceptor or donor sites within or near the dystrophin gene and results in restoration of the dystrophin reading frame and restoration of the dystrophin protein activity.

8. The method of claim 3, wherein the differentiating step comprises one or more of the following to differentiate the genome-edited iPSC into a Pax7+ muscle progenitor cell: contacting the genome-edited iPSC with specific media formulations, including small molecule drugs; transgene overexpression; or serum withdrawal.

9. The method of claim 3, wherein the implanting step comprises implanting the Pax7+ muscle progenitor cell into the patient by local injection into the desired muscle.

10.-85. (canceled)

86. A single-molecule guide RNA (sgRNA) comprising in the 5′ to 3′ direction, a spacer sequence, a minimum CRISPR repeat sequence and a tracrRNA sequence, wherein the spacer sequence comprises an RNA sequence encoded by SEQ ID NO: 1410464.

87. The one or more sgRNA of claim 86, wherein the spacer sequence comprises from 19-25 nucleotides.

88. The sgRNA of claim 86, wherein the sgRNA comprises at least one modification selected from the group consisting of a modified sugar moiety and a modified internucleoside linkage.

89. The sgRNA of claim 86, wherein the sgRNA is complexed with a Cas9 protein.

90. The sgRNA of claim 86, wherein the Cas9 protein comprises a nuclear localization signal.

91. A method for treating a patient with Duchenne Muscular Dystrophy, comprising administering a nucleic acid encoding the sgRNA of claim 86.

92. A method of treating a patient with Duchenne Muscular Dystrophy with a nucleic acid composition, wherein the nucleic acid composition comprises the nucleic acid of claim 86 and a second nucleic acid encoding a Cas9 endonuclease, optionally wherein the Cas9 endonuclease comprises a nuclear localization signal, and optionally wherein the Cas9 endonuclease is a Streptococcus pyogenes Cas9 endonuclease.

93. The method of claim 92, wherein the nucleic acid composition is delivered to the cell by a viral vector.

94. The method of claim 93, wherein the viral vector is an adeno-associated virus (AAV) vector.

95. The method of claim 94, wherein the AAV vector is an AAV9 vector.

96. The method of claim 91, wherein treating the patient with Duchenne Muscular Dystrophy comprises editing a dystrophin gene in a cell of the patient.

97. The method of claim 92, wherein treating the patient with Duchenne Muscular Dystrophy comprises editing a dystrophin gene in a cell of the patient.

98. The method of claim 96, wherein the cell is a muscle cell or a muscle precursor cell.
